United States Patent Application Publication US 2026/0191916 A1 - sequence listing, part 25

SEQ ID NO: 45 - DNA, 1380711 bp, Eggerthella lenta
  source 1..1380711: mol_type = genomic DNA
tgggaaccgtttttcgcccaacacgctgcccgacgacggtcgagccggggtggccggtcgcgacggacgcgcaaccatgacccagctaccaagcgaatgggtcgatgtcgcgaaaatccccccgtcgcggtaaaaacgagtcggtttggtaatcatactatgttgcttacatttctgattcgaacacccgacctgggaggacgcgcttgagaaggttcagcagcccaagaaggtggcggtcgggcgcccttcaggattacccaaccgttccgtttttaccgcggaagcccgaacgtcccgtcaagcggcccgccggccacgcgcagaagggcatcgggaacgcgctcggacgaacgcagggcacgacctgcggctttcatacggtgcacgcgggcgtatcgagatcgacccgcgcattccgagccggcgcgtaatgcgcgccgcgcacggacgcgacccgcgcccttcggggtggcgctcagcactcggtgctcgccacgcttgggcgcctacgggcgcggcgctaccaaggccctagcgcagcttcgcgcgccgatctcgccagtcgggcatgaaggcgtccatgagcgctttgaagcgggagccgtggccgcgttccagcaggtggcacagctcgtgcaccaccacgtactccaagcactcgggcggatagagcgccaaacgcacattgatgcagatgcggcccgtggcgggttggcagctgccccagcggctggtcatgttgcggtacgccagcttgcccgccttcacgcccatgataggctcccacgcctccaccagcgcgggcacgcacgcctccaccacggcgcgccacgccgccacctcctcgggccccgcctcggccgccacggcggcgggcgaggcggcaacctgcgcgagcttcgcgtcgatccacgggcgcttctcgcggacgaacctctcgatgtcgcgatcgcgcacgtacgccggcgccgacacctctacgaacccgccgccgcgatgcacgcgcaggttgaggttcttgatgcgcttgcgtgtgagccgcacgaccaggccgtccaccacgagttcgacgggctcgacgggcgcaacgggacgcgaggccgaagcccgcccccgcgccgcacgctgccgcgggctcacgcgaccacctcccgatcgcgccggcgcggcccgtgcacgaaccgcacgagaagcacggcggtcagcgcgaacgtggccgcctcggccgcggggaacgtggcccacacgcccgccatgccgaacagcgccgccagcacggccgcgaacgcgagcatggccggaagaccgcgcacgatggagatagccaggccatacgccggcttctccaccgcgctgaagaacgccgccgccacgatgttcgcccccgcgaagaagtacccgaggaagtacacgcgcatgccgtccacggcaagcgccgtgagctgcggatcgttgtctcgattgaacgcgagcgcaagcggctcggcggcgagcgccaccgcagcgtacgtcgtcgtcgcgatgacgagagccgtcagcagcgccaggcgcagcaccgcgcgcacgtcgcggtcgctgccacgcgcgtacgcgttgctggccagcggctggatgccctgcgcgatgcccacgaacagggcgctcgccacgaacgcgaagttcgcgaccaccccgtaggccgccacgccgatggttccctcgaacgcaaggatcaccaagttcagcaccagcaaaaccagcccgcccgacagctctaccacgaacgacgagaacccgagcgccgcgatatgccccacgagccgcgcgcgcagatgcaagcgcaccggccgaaacgtgttgcgcttcctgaggaaatggatcaacagcaccgccatgctcatgagcggagcaaaccccgtggcgaacgccgcgccgaacatgccccacccgaacccgaatatgaacaacgcgtcgagcgcgatgttcccgaagcttcccaccagcatggcgaccatggccagctgcgggctactgtcgttgcgcacgaacggcagcagcacgttgttcaacaagaacagcggcgcgaacgcgaagatggtgcgcaggtacgtcacggtcagcggaagcgtggcctcgtccgctcccaaaagcgacgccaacggcgtcgcgaacgcctccacgaccgcaagcagcaccgcggccgcgcagcccgccatgacgagcgccgtggtgaacacccggttcgcccccgtgcggtcgcccctcgccgagcacacctggaactcggttgccgcgccgatgcccagcatgaggcccgtagcctgcagcaccgtgtacagcacgatggagaagttaagcgccgcgaggccgtccgaccccaccccgttcgcaatgaagaacgtgtcggccagtatgtacaccgacacgcctaccatgcccagcacgttgaacgacacgtaccgcgcgaacggacgcgccatcgacgacgagccggccatgccggcaccgcgtgccatcgcgcgccgcctcacgcctcgagcgagatgtcgtatgccgcgttgcgcgcgatgccgaactcttcggctatcgcgcgggcgacgtccttgctgcgcacgccggcggccttcagctcggcggcgcgggcgcgggctgcgacttcggcgtcctgctcggcggcggcgtcctcggcctcgctcggaccgtcgatcaccagcacgatctcgcccttgatgcccgcgccctcccgctcgcgcgcggcgaacgcgtcgcgcacctcgggcagcgggccccgcaccacttcctcgtgcagcttcgtcagctcgcggcacacggcgatctcgcggtgcggaaccgtttccgccagcgaggtcaaggccgccaccaggcggttcgggctctcgtagaacagcagcgccgcatcgagcgcgcgcaggctctccaccacggcgcgacgttcggcgtccttgcgcgggaagaagccaccgaaatagaagcgcgggttcgcactgccgctggccacgtacgccgtggccacggccgtggcgcccggcagcacctccaccggcacgcccgcctcgcgggcggcgcgcacgaggcgcagccccggatcggacacgcccggcatgccggcgtccgagcagtacgcgatcacttcgcctgccgccacgcgctcaaccaacgacgacgcgcgctcgccgatgagcgcctcgtccagccgctcgatgcgcttctcgatgcggaatgccgctagcagcttgcctgtgacacgcgtgtcctcggcgcacaccgcgtcggccgaccgcagcgcctcgagcgcgcgctcggtcatgtcgcccaagttgccgatgggcgtaggacatatgatgagcttgccggccatgtgcttccttccattgctgcgcgcgccgcgccgttcttcgttgtcgtccattgtcgggcaaacgggcaaccttggcaaacgcgcaggatggaaagcacgcgagcagccgggtcgggtcagccctttttggcgcggggatagggcgcaagcccttctctggcgcggagtgggatttgggacttaggtgtcagcggccgcgccggtcgcacgccgcgcccgccacgaatcggcgcggaacgcgcccacccgctcgcaagcgccaccccgcgcccagaagagcgggccccacccgaggccaccttccccgcctcccccgcctcctctcctcttcctcccctgccctccatacccgcgcgtcaacgcgctacaatagctccagcttatcgacccgagagaagggaacgcgcatgcagcagcaactcacgaaacagacccccgagggcttcctgctggtcggacgcatcgacgcgccggagcagccgaaggcggcagtcgtcatcgtccacgggctgtgcgagcacttcggccgctacgactacgtgacgcagcggctgctggaagccgggtacgccgtcgtgcgcttcgatcatcgcgggcacgggcgctccatgggcaagaaggtgtggtacgacgaccgcacgcagatcgtatccgataccgacctgttcgtcgaagaagcccgcgcgcagttccccgacctgccggtgttcatgatcggacactctatgggcggcttcggcgccgccagctacggcacggcccatcccggcaagctggacggctacgtgctgtcgggcgcttggacgcgcgaccacgcgagcctggcctcgggcgccgtcgagcaggggctcgaccccgagacgtacatccccaacgagctgggcgacggcgtgtgctccgaccccgccgtgggagaggcctacctggccgaccccttcgtcatcaaggagttctcggtggcgctgctgcgcgccgtgcacgacggccacctctggctgcgcgcgcaggccgccgatttcgccgacccggtgcttctgctgcacggcggagacgacggcctggtcagcccgcaggacagcatcgacatgttccgcgaagcgtcgtcggctgacaagtcgctgcgcatttacgcgggcctctaccacgagatattcaacgagttcaaaaaggaccgcgtcatccgcgatgccatcgaatggctcgacgaccacgtgaggtaagctgcactggccaaggccgaacatcgccacgccaacggggaaaagcgcctgcgtcataagaaggatcgacgcaggcgcttgcacgagggcaaagccccctcgcggccggacagccgtctgcgtagccgagcccggcatgcgccgcatcctgccgcaacaggaaaaaacgcataaaaatgcacccccccccccgctcatccccggatcgagcccctatcaatggtattctgtagccatcatgaacatccatcgacgaagcggtgcgcgtggaacatatgactgacagcgaattcgagcaggtacgctcgtttcttgcccagacgtacggtctggacatggattcgaagcgcaccctgctagaatgccgcctcgcgcgcgagcgcgatcgtttgcagctgccgtcgttttcggcgtacttcgacctcgtggagtcagggcgaaaccagcaggagcgaaaccggttcgtcaacctcgtcaccacccattacacctacttcctgcgcgaaagcgcgcagttcaagttcctcttcgccacggctttcccggaattgctggccaagcggccgaaccgcccgtggaacatactgtgcgccggctgctccacgggagaagaatgctacagcgtctcgatgctggtcgaggactacgcgcgaacccacccgatcccctccgttcgcatcaccggcatcgacctgtcgcaacctgcgatcgaagaggcgcgtacggccgcctatcccgaatcgcgcatcaacagggtgccccgtcgctggcgcaatgcgtacttcgttcggaacggtcagctgtacaccgttgccgagcgcatccgctcgcgcgtctttctggcgcagggcaacctctgcgacgacgaagtcctgcgcaggacgtacgacctcatcatgtgccgaaacgtcatcatctacctcaaagccgaagttcgcaaccgggtgatcgcgacattgcaccgccacctcgccccatcgagctacctcatgctggggcacgccgagatcatccgcgaacgtacgctgttcgaataccaggggaactccgtttatcgaagacaagcgaaagcgaccaacgtatgagcatgaaaccgagcaacatcagcataagccgcatcttgatgatatcctacggcatcgtcatcgccctgttcgccctttcgatcgcagtggcgctctacggcgtccacgcgaacgcctccatgaccaaagagttctacaaccggccgtacatggtttcgaaaagcgccgtggcgcttcgcttcacgatcgaggagatgtcgacgtacgtcgagcagctgcttaacgcagaaaacgacgcggcgaaacagaaagcgctggtggccatcgaggatctcactgaacaacgcatgaacgagctgaacgtcgtccggtcgctgttcaaagccgatcccgatcttctagaacgcttctcgaacgcctgcgacgagctgggcgcgcgccgcaacgccgtgatcggcgcagccgaagcgggagacatcaaccgcgccatcgacctgtactcgaacgagtacctcgcgcaaaaggaagtgaccgtcaacctgtccaccgaggtcgtgaacaccgcagagcacgtagcgcaggccttcgtcaaagactcgttcagcgtcgaggtcggaacctcgctggccatcgggcttctagggacggcggccatcgtgctcgtcatcgttatgtggaggcgcatcacgcacagcatcgccgcgcccattcaggagatcgaccgcatagcgaagcggttggccgacggcgatctgacggtgcgctcatcctgcacgtccggcaacgagctgggctcgctcgcttcgtccatgaacgaaacggtagcttcgctgcgcttcgccaccgagcagctcagcgaaacagccgagcaggtggctcgctcgtcatcgcagatgtcggacagctcccaagccgtcgcgcaaggctccgccgagcaagccaccgccatcgaagagcttgccgccaacgttcagagcatcacgcacgtggtgggagagaacaccgaaagcgtcctgaccgtgaattccaacacctccgatgtactgggcgcggtcgaggaaagcagcgactcgatagcccgcaccgtgtgcgccatcgaggagatcaaagacaacgcccagagcatctcgcagctggccaactccatcgaagacatctcgttccagacgaacatcctcgcgctgaacgcctccgtcgaagccgcgcgcgcaggcgatgccggacgcggcttcgccattgtggccgaggagatccgccgcctcgcctcgcaggtgagcgaagcgtcgcgtgcggctgacgaactcgccgggcgcgccatcgaaaacgtcgaggccggaagcgagctgatcggctccgcatcttcgaacatggaggaagccgttacctctatcgaagacatcaagacggcgatgtcctccatcgctcacgcctccgagcagcagctcgaagcggttgcccagatacaggagagcatggacagcctctcccaggtcgtgcaggagaactcggccgcctccgaggaaagcgcggtcatcggagaggagcttgcggatcgcgcgaacgaactcaagcacctgatcggccgcttcaaaatcgatgcagatccgcacgaaagcgaagctggggcatgacgcgattccgaaccgaaacaggcagcgcgccgagcggatcggaaggcatccgagaagaccgcgaacgcctgcgcgccgacaacgccgccctgaagcagcagctggacgtcatgcgggcgctcgcattccgcgaccagctgaccggcttgttcagccgccactatttaaccgactacctggagcaagagatcgaacgcatgagcggcgaagcgaacatcgtgctcgccctgtgcgatatcgacgacttcaagctcatcaacgacgtgcgcggccatcaggccggcgacatcgccatcgtctgcatcgccgacatcctcgacgacctctccggcaaccatccggtcatccgatggggcggcgaggaactgctgctcgtgctgttctccacgcccgaccacgaggccttgcgtctgtgcaaccagatgcgtgaggaagtggccagctatcccatcagcgacgacttaggcgatttttcgtgcacgctcacgttcggtctgagcgcctacgatccggaactcacgttcggcgagaacttcgcatcggccgaccgcgcgctgtaccacggcaaggagacgggcaagaaccgttgcgtgttcgcgcaatcgaaccagatagagcgcgacggagggaaccggtcgtgaaacgcgaggagatcaccgtgcaggcgaagctcaagcccaattgcgggctcgagaacacgcgcgcttcgctcgtcatgcgccgcatcgcgccgttgtgcgactcggcaacatgccatccgcacgcgatcaagagcagtcgagagacgattccctacctgcgcgaccacggcttgttcgtcaccttcgtctcgcgcacgcccgagcgggtgctcgcagccatcagcggtgcgttcttcgtggacagctgcaccatcgtggaggatcccgaaggcatcccgccgttcgagatgccttccgcaccccaggaagacgatgcagaaaacggagggatcgaagcgatttcttcgttcgccgatcgcgatgcgcgcagcgagcgagacgaaaagctgtcgaacctgatcgcgcagctggaggagacgaaccggtctttgcgagcgcacgccgaaagccttccgaacgaccgcgtgctcagcgatatcgcgttctcgtacgcgcagaccctcgaccacctgcgatccaccgtcgccctttcgcgcatcgaagcgttcgaccgcatcgccccatcgcttcataagctcgtcgaggactacgggcgccagttcggcgttcccgtcgatctggagctcgagcaaggacgcatggatctggatcgttcggtgctcgcatccatcgaggaaacgctcagacgcgcccttcgatcatgtatccgcgacggcatcgaaagcgccgaggaacgcgccgacctgggaaaaccggaacgcgcaaccatacgcttgcgcctggaaaacgaaggctcggatgtcgtttgccgcatcgagcacgacggcaggcccttcgacgcgcaccgtatcgccacgatagcgtcgaaacgcggccttctcgcccgtccgctggacgcgtattccgacgaggagataggcgcgttcatccttctgccgcaattcttcttgccgagcgccgccagcgatggcaacgccttcgcagaactgaacgagataggctgcatgctgcagcgcatcggcgggcgcggcacgatgcgcaacaccgaacgcggcacgttggagatcgtcctacgctttcccgtgccgttcaccgtgttcgaagccgccctgctgcgcaccggaggcgtccgcttcgcagttcccgcacagcagatcgtgcgcttcgaggcgttcgaccccgcccgcgtccagcgcggcggcgcagcgggagaagggtcgaaagcaacctcaacctggtacgaggacgaacacggcgcgcatattgagatgctcaaccaaggtgccaagccctttccgcttgacgcggcgcaccccgcatataccgtcctgcttgaagctctgggggaacgatacgctttggccgcagacgacgttgagggctacgagcggatctcgatgctgcagcttccggcactgctcgaccgccggtgcatgcacgaactgagctacatcggatacgccatcctgcaagacggttcaccctgcatcgtgataagcgtacggcgctttctgaacgacgcggcgaaggacaggggaacccatgcgcgaccgtagccaacgtctgcactggattgaaacgctcatcggcaaggaccgccaagaggctcggcggaataacgcgctggtcatccccaccgatgacggagacatggccatcgcgttctcatccatcgtcgaagtggtcgccgccagccgcgtgcagccccttgccctcttgcccgagcagttctgcggcgtgctgttccgcggcaacgagctggctcccatcgtcgacacgagagcccccgacactggaccggggcacgtcgtgctcgtcgaaggggaaggatgcctgttggggctgcagttctacggcacgccctacgtcgtcgacctcgacgaaaccgaacatgccctcttggccatcgagcgccgtccgagcttcccgtcgggaacgcttcccctgctggatatcgacgccgtagcgaaagcgctgctcgccctcgattaacgccgcagtgcgcgagctcccaaccagcgcatcaggtagaatggctcgaacaaccagccaccgcatccgacgaaaggacgcatgccatggagttcgcacgcagcacatggaggctgttcgccgccaatgcgcgaaccgctatcctgttcgaattcggtttccgattcttgttcgccatcctgttcgtaccggcatgtttcggcatggtggatctcgcgatggaagcggccggacttgcctacttggccgacacgaacatgacgactctattcgcgaatccgctggcgtgggtgtttttgctcgtggccgcgcttgtgctagccctcggagcccttttcgagatgtgcgccctcgtcgttgtcatgcaggcgggaaagacgggtcggcgcatcggagtgttcgaaacgagccggctcgcattctcttccgcccggcgcatcgcacgcccatcgaactggcttcttgcgctgttcgtgctgctgctggttccgctcacgaacctgaccgtcacttcctcggcgctcaccggcgtgcggcttcccgagttcattatggacttcatctgggaaaacggcgcgctgaccgcggtgttcgtcatcgtgatggccgcactgtacctgcatgcgttttttctggcgttcggcattcacttcttcacgctgtgcgacgaatcctggatgcaggcacgcatctcgagcaggagcctgctgcgcggcaacgcctggcggctggcgcgccgtctgctggccttgttcgccgtgttcgcgtcgggagcggtcgcggccatagtcgtcggcgtcctcatcttggccgccatcctagaaggcggcctgccgttcggagtctccttcgcgctcacgctcgtgatgttcgcgttcactatcgtggtcgactgcgtgttcgcgccgctgagctatgccgccctcagcgccacgttctacgaattctcgcaggagcggggcatcgacatcccttaccgcatcgacgagccctcgcgtacgtgcaggacgaggctcgcgcgcgcagcggtcggctcctttctcgccatgctcggactcgtttcgttgctgtcctacgaccctttgcacggggtattcgaatccgaaagccagcgagagcccgcgccggatttcgcgatcaccgcgcatcggggcggcgcgcgcgaggctcccgagaacaccttggctgcattccagaacgctatcgaccaaggcgcggattgggtggagcttgacgtgcagcagacggccgacggcgtgctcgtggtgatgcacgatgccaacctcaagcgcacgacgggtctggataaagagttctggcaggtcacgtacgacgagatcaaagacctcgacaacggcagctggttcgatcccgcattcgcagaccagcggatatgcacgctggaagaggcgcttgcgttgtgcaaaggcaagatcaagttgaatatcgaggtgaagccggacggccacggcgtcgacctcgagcgaaagacggtcgacctcatcaacgcctacgatatgagagaccaggtggccgtcgcgagcatctcctacgagtcgctcgcgaaggtgaaggagatcgacccctccatgcccaccatgtacgacatgacgttggcttacggctccatctcgagcatcgagcatgtcgattatttcagcgtcgacgacttcttcgtcacccaggaactcgtcgacgaagtgcaaggggcggggaagatcatatacgcttggaccgtcaacgaccccgccaacatgtcgcgcctcatcgattatggcatcgacggtctggtcaccgacgacatcgcacaagctcgcgagctgtacgaagccgcgctgaacgaggggcacgagtacttcgccgccatctgatcgacggcggcgaacgcttgcgaggtgttggcgcgcccgagagcccgcatgggcgccacccgcaaggcgactcgttgccccgcgcttcgatatcgacgtcgtgatggaaacgccgctcgccctcgaccaacgcctcgatggccgaaaaagccgccgtcggacgaggctacttagccgatgcgaccgatgccgcccggtcgacggcgtccgcgaacgttttcggacgctcgtagtggatgtcgtggcccgattcgacgacgacggtttcgcagacagccacgagctgctgcacgcgtgcggcgtcctcgtcggagttggcggcgagcaatgtaccatcctcgccgtagttcgtcttcgctttcaggtacacggcaggacaggttatgcagcgcagaaggtcggcctggtcgatgccgtcgaaccacgtgccgtcatagaacgtctcgctgaaccgcacgtcgaagtcgtcgtagaagtacaggccacgcacccagtcgtgcggcacccaggccagcgtgagatgcgcgtcggggttcgctgatcgctcctgcgccgtccactccgcgattttaggctgcagtcctccgaacaggctgaacaggtagctgtgctgcgcgtagtacacggtcgggtcggcaacgtcgccctgccggaggaacgcgtgcgtcaccatgaagccgtctttccatgcgaagcagcccggttcctgctgcatctcgaccggcgtgacgcggaagaagggcggatcctccagcacgcatgccgatacccgctcggcgtcgttggcggccagccacgcggcgatgatgccgcccgacgaatggcccgacacgagatagcacgcgccgatcttttgcgcagcgaaggacttgagcgcccgcccgatggcctcgcatgagtaaagcgccggatcgtggctcgattcgccgtgaccgaagcagtcgacggcgaacacgtggtagcgctgcgcgagatcgggcagcacgtgggcatagtcctcccactgcacgccctggccgtgcacgaagtatcccgtgcggccgacggcgcacttgatggcgaaaaagcatcgaattcggaagtctccatccagtgcgcaagagcaccgggaatcctcctcctcgcataacaccaggtcacaggatggctcgcttccggcaccatgcatcgagctcgtccgaggctcgcgatttcttccgaattcgatgcctttgtgccatttcgagggcgactggccgcacggaggggcaacgcgtcccgattcgcgatgcaagaagacctccgctgggcgcgaacccagaacaacccttaggcgagcatctcggccgatgctctcccagtggcaaatccgtacaaatgcttcacgtgaaacactcggacgcgcacaaaaaacgccgcatcactatggatgcggcggccaggttcgcgggttcgcgcttcatgcgcttgcgcgagataggtgcgatccgaaaaggctacagcagctcctccacggcgggcgccacgacatcggggatggacgcggtgggctcgaaacggcgcacgacgttgccctcgcggtcgacgaggaacttcgtgaagttccacttgatgtccggcttgccggcgtagtcggggtcgtccttcgacagcaggtcttccagaatgggcgtcaactcgtggccgtcgtcgaagccctcgaagcccttctgctgctgcaggtaggtgaacagcgggtcggctccctcgccgttgacctcgattttcgcgaattgcgggaacgtcacgccgaaccgcgacgtgcagaactgcgcgatctcctcgttcgtgccgggcgcctggtggccgaactggtcgcacgggaagtcgaggatgtccaggcctcgctcatgcaacgcggtgtacagctcctggagctgggcgtacgtgggcgtgaagccgcactcagtggcggtgttcaccaccagcagcacgcgaccccggtagtcggcgagcgacacgtcgttgccctgctgatcctttacggtaaagtcatagatgctggaagccatgggtccttctttcaacgaggggttgttcttcgtctgtgatcgtacctatgataccgccaaatgatactttgttgataacattttacggaacggtcatacttgcgcaccctgcggcgcgaagccgccaaccgaaggatcgcccaccaaaacaaggatgtcgtaatcctcgctccatcctcccgactgatcgctgtcgtagcagtacacgctccccggcccgaccaccttcaacagctcggccagctcctccgcttccgcgctgttttccttgtggtagtacgacacgcgcgtcaacgcagcgttgaagtaggtcgcgttgtccaccgtcacgttctcgaaccccgcgccgcgcaccttctcggccacctcggcagctgcgccctcgacgccgcagccgttgagcacgagcaccgtcacctggtccttgccgatgcgcacggatccagcagcatcgaccgcagccgaagccggctctggcacggaagccgcacgggatagaacgtttccttcagccgacgcagccgtctcgtacgccgactggttcgctgactcctgcgcggaaggctggccggtcgagcacgaaccgagcagtatccccgacgccccgcataatacgagtgcgctcgcgagaagagccccatgcgccgtcttcgcgttcacgctcatcgcaatcaccgcctatcgtgctcgaacatgccgtctcagaaaagagtatacccccccccctgacgcgccgccgcaagtttgcagcaacgcgaaggtttgtcctgcggagtgtttcacgtgaaacatttgtgcgctatgcagggtggcggccccgacccgcctcagcggccgacgcgcacgccgcgcgcttagatgcccgccagcacttccaccacggcgagcgcgaacaccactgcgaaacccacgcccacggccgcgaagctggtgccgccacaacgccgcacgtaggcgagcgcctcccgcacgttcgtcgcgccctgttcgaacgcgcggtccatcgcgcgctcggcgctgacgcggtacagcgagtagaacgccatgccgaacacgaggctcgccaggaagaagagcatccccaccaccgtcgaaagggacttcgacaggaaatcggcgccgaagctcacggcgatccagcagccagccgcgaggtactgcttgcggtacagcaggtacagaggtgtcagcaacagcgcgagccagctgaacccccacccgcgcatcttccgcaccatctggggtttcggactgcctccctcgccttccgcataagccgcgtacaaattgcaaagctcgtacggctctcccgcgggcgtcctcgccatgaaccgggcatcgtcgtccatcgcccaacctccttccgaaagcaacggggcgagccgctccggcccgccccgcgtcaactcgctcgtcgttcgctatgcccgctccgtctcgatttccagcgcgccggcttcttcttggacggcctgggggcggccggcgtccacgaaccggtcgcgcgccttcttcgcctcggcctccttgtcggcaaggttcgccttcgccacgctgatcatcagcttgatgcggttgagctggttcacctcggacgcgccggggtcgtagtccaccgccacgatgttgctttccgggtagcggcgacgcagctctttgatgaccgccttgcccaccacgtggttcggcaggcacgcgaagggctgcgtgcataccacgttcggcgcaccggttttgatgagctccaccatctcggcggtcagcagccaaccctcgcccatcgagttgcacaaggacaggatctcgctcgcgtactcggccagctcgtagatgtcggccggcggctcgaagcggctggagtcctgcagcgccttcgtgacgggcgcccgcatcttcgcgatggcccacagcccgatgcgggaacccagcgcgcccttcgccgaacgaccgagcgggtccttctggaagatgccgccggcgatgccgaacaggaagaactcggccaagcccggcaccacggcctcgcagccctcgcgttcgatgacgtcgacgatctggttgttcgcagtgggatggaacttcaccaggatctcgcccaccacacccacacgcggcttcaacccctcgccggccagcggcagcgtatcgaagtcttccacgatgcggcgcaccgtcttcttgaactcgccgcgcttcaagccactgcgcagctgcgccttgcacgtcgtcatccagtggtcgaacaggcggttcgcgctgccctcctcgacctcgtacggacgcgtgcggtacagcgccatcatcagcaggtcgccgtagaagatggcgtatgcggcctgcagcagcatggacggcgtcaccttgaagccggggttgctctcgcccagatccttgaacgacagcgcgatgacgggaatatgcggcagccccaccgaggccagcgccttgcggataagcgagatatagttcgtggcgcggcagccgccgcctgtctgcgtgatgatgaccgccagcttgtcggtatcgtagcggccggacatgacggcctccatgatctgaccggtgaccagcaccgacggatagcagatgtcgttgttcacgtacttgaggcccgcatccaccgccccgtggtcaaccgacggcagcaactcgaggttgtagccgttgcgctggaaaatgtccatgagcaggtcgaaatggatgggtgccatctgcgggcagaggatggtgtagcccgcgtccttcatctcctgcgtgaacacggcgcgcgggaactcggtggtggcgccttcgcgctgcttgaagcgctcggccacctcgggcgccgccttctcggtgaacgtccggggcaccgtgcgcgcgatctcggcggcgatgcggccctcggtcacgccggttttcgcgtcgatggcggcctcgggcgaggcgaggaacttgtcggggtcgaacgacaccgccgggcagccgcacggcgtgcgttcggcctcggcctgctcgtcggcctggtccttgagcgccgccagcaggctgcgcacgcggatgcgcgccgcgcccaagttcgacacctcgtcgattttgaggacggtgtacaccttgcccgccgcctcgaggatctcctgcacctggtcggtggtcagcgcgtccagaccgcagccgaagctgttcagctggacgaggtcgaggtcggcccgctcggtggccaccttcgccgccgcatacaggcgcgtgtggtacatccactggtccaccaggcggatggggcgctccagcgtgccgaggtgcgcgatggagtcctcggtgagcaccgccaggccgaagctggtcagaagctcggggatggcatggttgatctcggggtcgttgtggtaggggcgcccggccagcacgatgccgtgcgtgcccgtggcctccatccaggccagcgtctcctcgcccttcgcgcggatgtcgcgcttgaacgcctcgtcctcggcccacgcggcgtccacggcagcgtcaacctcggcctgcgtcggcgcgccggccgcgcccatgagctcaggatgcgcctccaccagctccacgaacaggcgcttcttgaggtgctccttctggtcgtacggcagccacggcgtgagcagctccacgtcggaggtgcgcagctcgtcgatgttgaggcgcagcgcctcggggtagctggccacgatggggcagttgaagtggttgcccgcgccctcgtcttcctggcgctcccacttgctgcacgggaaccagatgaagtcgggatgcttgttcagcaggttcatgatatggccgtgggaaagcttcgcggggtagcacaccgattcggacggcatggactcgatgcccgcctcgtaggtcttcttcgtggacgggtcggacagcaccacgcgaaagcccagcttcgtgaagaacgtgaaccagaaggggtagttctcgtactggttcagcgcgcgcgggatgcccacgctgccgcgcggcgcgtcctcaggcgccagcggctcgtagccgaacaggcgcttgctcttgtactcgtagaggttcggcacgttcttgccctcatcgaacgtgcccgcgcccttctcgcagcggttgcccgtgatgaagcggcgatgcttgcccgtgacgtcgtccacgccgaagtcgttgacggtgagcaggcagtggttggagcacgccttgcagcgcacggttttctgcgtgggcgaaagcgccgccagctgctccagcgacagcaggctggaaacgacttcgacggagccctcggccgcatcgaactcgctgctccatgcgtctccggcctcggccttgcgcgcctcgcgcgcgacggcctcctggtagcgctcgcgcgccagcagggccgcgccgaacgcgcccatgttgccggcgatgtcggggcgcacggcttccacctcggacagctgctcgaacgcgcgcagcacggcatcgttcaaaaacgtgccgccctgcacgatcactttcgtgcccacgtcgtgcgggtcgcggattttgatgactttgaacagggcgttcttgatgacggagatggccaggcccgcggcgatgtcgcccacggtggcgccttccttctgcgcctgcttcacgcggctgttcatgaacacggtgcagcggctgcccagatcgacggggcgcttggcctcgatggcagtctgagcgaactcggccacgcccaagttgaggcccgtggcgaagctctcgatgaagctgccgcagcccgagctgcacgcttcgttcagcatgatgtggtcgatcacgccgtccttcacgcgcaggcacttcatgtcctggccgccgatgtcgaggatgaactccacgcccggcagcatctcctgcgcgccgcgcaggtgagccacggtctcgatctcgccggaatccacgcgcagcgcttccagcagcaagtgctcgccgtaaccggtcaccgtggcgtggccgatgcgcacgagcggctcgcccgtgtcggcattcaccggcatgtcgttgtacaggttggtcagcgcggcgcgggcgcagcccagcacgtcgcccttgttgctggcgtaatgcgaccacagaagcgcgccgtcctcgccgatgagcgcggccttgaacgtggtggaaccggcgtcgatgcccagataggccgtgccctcgtagtccatcagctcgccgcgacgcacgcattcgccgtcgtggcgttgcttgaaccgggcgtactcaccctcgtcggcaaacagcggcggcagacgcaccacttcggagccctggatgtcgccgaggttcttcagacggtccagcacgtcggacagaagctcggctttcaccgtctcgctggccgcgcccgcgatggcgcagccgctggccacgaacagatgcgcgttctcgggcacgatgatgtgctcgtcgtccaactccagcgtctcgtagaagcgcttacgcagctcgggaaggtactgcaaagggccgccgaggaaggccacgtgaccgcggatagggcggccgcacgccaggccggagatggtctgggtgaccaccgattggaagatggacgcggcgatgtcctccttgcgggcgccttcgttcagcaggggctgcacgtcggtcttcgcgaacacgccgcagcggctggcgatgggatagatggtggtggcttcacgagccagctcgttcaagccgccggcgtcggtgttcagcagcgcggccatctggtcgatgaacgcgcccgtgccgccggcacacgtgccgttcatgcgctgctcgatgccctggtcgaagtagatgatcttcgcgtcctcgccgcccagctcgatggccacgtcggttttgggaatgaaggtttccaccgccgtcttcgaggcgatgacctcctgcacgaactcgatgcccagccactgtgccagcagcaggccgcccgatcccgtgatggcgatggtcatgcgctcaggaccgaagtcgaccgcggcctcctccagcacttccacgatggtggcgcgcacgtcggcgtgatggcggcggtacaccgcgaacttcacgtcgttctcctcgtcgaggatggccagcttcaccgtggtcgaacccacgtcgatgccgatatgcaggttgttgttctctttcatagctcccttgccttacagcttgatcgattcgcccggtttgatgaagaacagcctcatggcgataagcgccatctcctccgagctttcccgcatgcccgtctcgatccagcgcgtgatgacgccgagataggcggacgcgaagaacgccacgtaatagccgacgaacggttcggggtcgttgcggtaacgctcgtgcaagacggactggacgaggttcgtgcacaacgagtcgcgcaagcgagggccgaagcccacatcgccgccggagcccaacaccgcatgaaggaacgcgccctgctcgcgcaggtagtcgaacagaccaaccagcagcggcaacggcttcttacgagcgcgatagcccaaaagctcgtgcacggtgaggttgcgcatctgcacctgaaagcgctcgagatcttccatgacctcggcttccagctgagccagcagatcgtctttatcgcggaaatggttgtagaacgtgccgcggttgaggtcggctcgctcgcacagatcgttcaccgagaagccgtcgaagctgcgctcctccatcagctcgatgagcgcgtcgcgcagcgcgcgcttcgagcgcaggatgcgacgatcctgcggcgcagccgtgcaccggcgcgccgactggacggcggcagcagctggtgagacggttgtcgtagtcatgatcacctctattgaacagctggatcaataatgaacaggttgttcattaacgggtattatacccgttcgctgcaccgaatacaacgaggagcgctcaattgaccctacgccgatcacctttgcaacgatgagacgccgtcgcgtcaggactgggcggcccggccgcgccagctcggcttgagcccgaagcccctacgcgctcgcatccgcccaatccgagctcgcatctgcccgttccggggtcggcatcgagcaattcgagccgaagagcacgacggtcggcagcatcgcgtctgacgcacgggtcgagccgccaaccactcgtacgaatgtttcacgtgaaacattcgtacgcttttcataaggatcttgcacgcgttccctgcttttcgcagaggctctccgctcgaaaaatattgtcaccctagctcacacttctcgttgacgacctcctcgcccctccctatcattgatcccatgggtaccaaggaacaactgctgcgcttgctggaggacaaccgcgagcgccacgtatcgggcgccgccatggccaaggccatcggcgtgagccgcaacgcagtgtggaaagccgtcgaggcgctgcgtgctgaaggatatgccatcgatgcggtcacgaacagggggtacgcgctctcgcaagaaaacgacttgttgtcgccccaaggtatcgagcggttcctgccggacaaccgcgctttcgccgtcaccgtgcgcaaacgcgtggactccacgaacgccgaagcgcgccgccgcgcgctcgaaggcgcggccgaaggcaccgtcgtcgtcgccgaggagcagatcgccggcaaaggacggcccggaaagacgttcttctctcctgccgccaccggcttgtacctcagcatcgtgctgcgccccacgttggccgccgaccgcggccaattcatcacatgcgccgcagccgtggcgtgcgcgcaggccatcgagcaggtgacgggtgcagagtcgctcatcaagtgggtgaacgacatctattgcgacggccggaaggtggcgggcatcctcaccgagggcgtggtggacatggagtcggggcgcttcgagcacgccgttctgggcatcggcgtgaacgtgaagccgccgaccgatggatttcctcacgatatcgccgacgttgcaggcgccgtgctcggcgatcatacgggcgcgatccgatgcgagctggccgcggccatcctcgcacgcttctgggacgtctaccgacgcatggaggatccggcgctgtacgacgaataccgccgccgttgcttcctgctggggcagccgctggtcgtgcgtcagggagcttcgcgcgtacgagcccgcgccgtcgatctcacgcccgacttcaagctggtcatcgagttgcccgacaaatcccgtcgcgagctcccctacggcgaggtgaccatcggctccaccgccgcccgcccctagcgccgccctctccgtgtttcacgtgaaacatttgttcatgcatggtttgagccttgagccatgctcgtgagaagaaacgccggaaacgagtgaaacgcgccgttggcgtgcgcgcggtttgctatgctggttcgatacgcatcgcgaaccatcatttgagagaaagacggggcatcatgcagatcacgcctgctgaaatcgccgagacgcttgccatggtgagcaagcagcacctcgacatccgcacgatcacgctggggttgaacctgcgaggttgcacggacgccgatatagacgtcatggcgcgcaaggtgtacgaccgcatgaccgccgccgccgagcgtctcgtgcccacggccgagcagctggagcgcgagttcggcatccccatcgtgaacaagcgcatctcggtcactcccatcgccgagatctgcgccgccacgaacgccgccgacctcacccccatcgccgtagccatggacaaggcgggcaaggaagtgggcgtcgacttcgtgggcggtttcagcgcgctcgtgcataagggcgcctcgaaggccgatcacaagctgatggactccatcccacacgcgctgtccgtcaccgacaacgtgtgctcgtcggtgaacgtgggctccacgcgcgcgggcatcaacatggatgccgtgctgaaaatggccggcatcatcaaggccaccgccgaggccacggccgaccgccagtgcatcggcgcaggcaagctggtcgtgttctgcaacgccgtggaggacaaccccttcatggccggtgcgttccacggctcgggcgaggccgacgaagtggtgaacgttggcgtgtcgggccccggcgtggtgcgcgccgtgctggccgacctgccgaaggacgccgacatcacgtcggttgccgaagctatcaaggccaccgcgttcaagatcacccgcgccggcgagctcatggcgcgcgaggcgagcaagcgcctgggcgtgcagcagggcatcctcgacctgtcgctggcccccaccccggccgaaggcgactcggtggcccagatcctcgaggccatcggcgtgggccagtgcggcggtccgggcaccacggcggctctcgccatgctgaacgacgccgtgaagaagggcggcgtcatggcttcgtcgtccgtcggcggcctgtccggcgcgttcatccccgtgtccgaggacgccggcatgatccgcgcggccgaggacggtgcgctgtcgctggagaagctggaggccatgacctgcgtgtgctctgtgggcctcgacatgatcgcggttcccggcgacacgtccgtcgagaccatcttcggcatcatcgccgatgagtgcgccatcggcatgatcaactccaagaccaccgccgtgcgcctcatccccgccatcggcaagacggtgggcgaccagctggacttcggcggcttgctgggctacgccccggtcatgcccgtgaaccagttcgccggcaccacgttcgcccaccgcggcggccgcatgcccgcaccgctgaactcgctgaagaactaacgaagcgatcaaccagcgcgtttccgaaagcggccctgcggggccgctttgactatcgctcccattccatcacgaagcgctcgtacatttgggcctggtgaaagaatcggagaaacagaacctcctcctcagctatacggtatacgatcacgcaccccttgatgaagtgctcgcggtaagcgaagttgccaaagcgtagccctcgttgatcagatagcgaaggatgccgatggtcacatcttcgtcttcgacgtcgagcggctgcagaaatatgcctttgtcagtccacgtgcaaagcgcgtagtccttgaaccccgcttcctcgtacgctttcgcggggatggcgatctgccgtttgctggaaatctttattgacaacggttccgtcaaagctgccgttgccatagcgcgtctcctttaccaagcgattagtgcttggcatcagcgcatcacgcgcgagcggctaccaaggcatctcctcgtaggtgaggcccttttcctcggccagatacgcgaacagctcgtcgcagtcgaacaccttgatgagcgatttctcgaagtccttttggttgcgcgtgacgatggcgtcggcttccagcttgagcgcgtattggtacacacatggtcgataatgacattcgtatcgacgagaaacttcattggctatcaccaggatccgtgaggcctcaagctatacgacgctcccgcttcgcttctttgatggtcatattgtcgaaacgactgggagccctagccatcctccgaccgtccaatgcctttggcaaaataccataatgttaaaagtatttgacattatagaaaacggcttctatactgcgaaagtaaagagttcttgacattttgagcaaaaggagggcaccatggtcgagatggacgaaatggagcgggctattcgagaccgctcgcaaacgtacggctttcgcttcgccgtatgcgcgcttgcgctatggacgctgtacggcctgttcacgcacttcttccaaagcgcttcgtacaatcccctgcccagcctgctcctgtgcggcacgctcctgtaccagatcggctgggaaagctatctcaagcactcgatggtgaaggatgctgagagcttccaagagcccagcgccctgctccgcggcgtgttcgcagcagccgctttggcggttgtcgtcatcgcggcgggcatcgtgttctccgccggcatctcgtgaccgcacgcgagaccgcctcatgaggaacgacatcaaaacgcttcgcaagcaagccggccttcggcaagaggatctggcgcttctctgcggagtcagccgtcaaaccatcatcgccatcgagaacgacaagtacgaccccaccctcgcgctcgccatgaagctggccagcgtcctgggcatcgccgtggaaggcctcttcttcccggacgatgggtctgcaagcgagccgcgatagccgcgctacttccctctcaccacggcgccgaagggcagcaaggccaacttcgcctgcttgaagcattgcaggccgaaggggatgccgatgacggtaatgcacagcagcacgccgttgagcagcgcctcgagcgccaagaacacgccgccgaacacgaaccacagaacgttgaggatggccgaccccgcacccccgccgtattcgacttccttgccgaacgggaagaacgcgagccccgccatcttgaagcactgcgtgcccacggggatgcccacgatggtgatgcaccacacaaggccgaccaggcaccagctcacgccctgccagaaccccgcgaagatgaaccacagtatattgccggccacgctcatgaacgccccccttcaccacggcccccgtcatcgcgagacccttcgaacacggcgcgcaccaggtactccacgttgccctcgggccctgtgatgggcgactccacgacgcccgtcgcgtcgaacccggcatccgccaacgccgcgcgcacctcgtccaccgtgcgccgccgcacggcctcgtcgcgcaccacgccgtgctccgtctcgtcgggtcgcgactcgaactgaggcttcaccagccctatgaacaccgtgcccgactgcgagaggcgcgcgaacacgggcgcgagcgccgcgaggccgatgaagctgaggtcggccaccagcacgtcgaagggagcgcccaattccactggatcggccagcttgatgttcacgcgctcgaacacgctcacgcgcggatcctgccgcagcttccatgccaactgcccgtagttcacgtcgacgcacgccacgctggccgcgcccgcctgcagcaggcagtcgctgaaaccgccggtggacgagccgatgtccaggcaccgcaaaccgcgcacgtcctgtccgaacgcatcgagcgccccttgcagcttatggccgccgcgcgacacgaaccgcttgcggttcttcaccaccacctcggcatccggcgccacgcgcacggcggcgctggtggcgtacacgtcgcccaccttcacctcgtgcgccagcaccgcgcgcagcgccgcgtcggcatccgcgaagtatccctgctccaccaacagcgtatcaagtctgattttcttcatgggcacagtatatagcaagcgcgtctgcaccgatggaaacggagggtctcgccgtttcccgcttggcgcaggaaaggatcgcgagcgctaccccacgatctcgtagagccgcatgtcgtcttcgctgagaagcagcttgaagcccggtgtctgctcgtcgatggtttcgatgccgcgccaattctcctctttgtagcggatggtcgtcgtggtgcgatggtcgcttccctgcacgtcgagcatcagcacgtagcgcgcgtcgaggtcgttcacgagccgctgcacctcttcggacgtgctgatatcgcgcagctgtgtacgaaggatcttgctttcctcggcaccgccccttccgttgtcggacgagcgcctgaaataggtgttgatgccctccaccccgtagctccagcagctgccgtcgctcggcacgttgatgacgagagcaccctccccaatcagctccatcgccttcttcacgaacgcgtcttcctcccccgtcaacccgcgatcccatgaataccgcatcgacacctcgcgatggattttcatcagacccgcgccgatgtcggttttacccatcagcttcgcatgaaaggggaagaactggcacatgagcatcagcgcgacgaggatgcccaccggcaggtacctgcacttcggatgatccgcctgcacgcgcagagccttcgcgcaccacgacctgacgatatcgaccagttggacgaaacccaaggaagcaagcgggatggcgaaaagcgccgtcatcgcgcccgttcggtagtagtcggtgtaccagaaccccgacagcacctgcttcaccacgccgtcggtcgacacgtcgataacgtacacgacgaaggcgaacgcgtaagcgaccgtcatccacaagtaccgcctgttcctgcacgtgtagatgacgcccgccagcaccgcgacgctcaagaaaggctgcacgccctcgcgcgtcgtgaacatgaacagcaggccaccgccgatcgcctcgagaggtgaaagcgtggctttccacgtgtactgaaccacgttctgcaagaacggggcgaaatacagcatggcccagcccgcgcatgccaccgcgaaaagcgctgcggctgccgcgatgcgcttcgaggcgatgcgcggcgcgtcgtcgcaaggcggcaccagtatccggcccatgcagtagagcaccgcccagattccgaaggtgaacgcgccgttcggctgcgacagcgctatggaaatgagacccgccgccacgaggagcgcgagcctgaccttacccgagagtcccttcgcttcgatcgccccgacaagcgcgatgaacgccagcgggatcagcatgaaggacaccatgttcgaaagcagctggccgtacacgacgaacccccacgggaacccgcagaacgctacaacgaacagcgagcccgcccatacgacccgcttgccttcgccgaacagcttcaggaacagcaggcacatgcccaggggaaacaccaccgccgtcagcgcgatgatggaagcgtttgcggcaagcgtcacggcattgccgaagaaagacgccacgaacgccgtgaccgcatgccaagccgaaggatagaacgagctggtgacgccctgatcgaggtacgagctcgcatgcaacgtggagaacgtgcccgtgtccaggaatcctcgcacaatcgcgaggtgcacggtggtgtcatcgttcctcgaaaacgattccggaccgtcgatggccaacaggaacacgacgaacacgaccgcgaacgccaccgcgacgtagagagccgccgccttccacgcgcccttcacgtcgtcgatggcgatcagctcacgagaggcgttcggggctttcgcccgagcgatgcccttgctcaccagcaaggcaatcgcgccgatcgcgacggcgatcgccagcaatacggggcccgaacacgtcacgccgacctcgaacaggacgatacccagcaccgccaggaagaaaatcgagatcatcggcgcaatcgcgacggaagcgaaacgagagacgaacagcgagcgggcgaacaagtaccccggcacatacagcaccgcaacgcatacgaccaccgccaaggcaagcatgagccacatagaattccccaagaattggtttccaacacctacgatctgaagattatagacgcaagggtgcgctaatgcgaatccattgcctcgttttcggctataagcgagttatcagttttctgcaatcaaaccggctgttttctcccatgtccccgacttatgcgcacctctgccatgcaaatcgcgccgcgtttggacgaaagaccgcatacgtttcggcatcatgcctggtcgcgtttttatcgaacctcgccttaaccaaatcgggcgttttccgggtgcacataactcaaggacatgggagaaatcgtcgattttcgtggcagaagcgcacacaagtcgaggacttcgctccgctgggcgtcgcctccctcggaagcaaacgtttcccaacgcacggcggccgcccgaaggcggccgccggaacaagcacgatgcccgctgcgccttacggcagcagcagctgggcgatctgcacggcgttgagggccgcgcccttgcggatctggtcagcgaccacccacatggccaagccgtgatcaaccgtgtcgtctcggcgcagacgaccgacgtacgtctcgttcgtgccggccagcagacccggcatgggatacgtgttcgtggcgcagtcgtccatgaccacgatgcccgggaacgcctcgagcgccgcgcgcgcggcctcgacgcccacctcgtcctggaactccacgtaaacggcctcagcatggcagcgtagcacgggcacgcgcacgcaggtggcggccacgcgaatgtcctggtctcccattattttcttcgtctcgacgaccatcttccattcttccttggtggagtcgtcctcgaggaacttgtcgatatgcgggatgcagttgaacgcgatgcgatgctggaacgcgctcaccgtgagctcgtcgtcggacttgccgtcgaggaactctttcgtctggtcgtacagctcggccatagccggggcgccgccgccgctggccgcctgatacgtggacaccaccacgcgcttgatgcgcgacagatcgtacaggggcttcaacgccaccaccatctggatggtggagcagttcgggttcgcgatcacgccgttatgccaagccacgtcgccggggttcacctcgggcaccaccaacggcacgtcctcgtccatgcgaaacgcgctggagttgtcgatcatcacggcgccggccgcggccacggcctcgcgcatctccttcgatacgctggcaccgcacgagaacagcgcgatatccacgccttcgaacgactccggcgtcatctcctgcaccgtgagctcgcctgccggaacctggccgcaccccaaaaacggcaacttcttgcccgccgagcgggccgacgccagcgcgcgcacctcggccgccgggaaatcgacgtcgtgcagcacctgcaagaactcagcgcccaccgcgcccgtggcccccgccacagccaccaccggatgagccggaatctctttcgtccatgtcatagcaactccttttccccgcttatgaaccctatcgacaagcctcgctcacgcgtttgcgcaaccaactgccgctagtatataatgaagaagtcagcggatggcctgaggtgaagagcaggcgacaccgttaaggtttgtgaccgctagttgctgctagcggtcatcttctttctggtgcgcccaaagcgccttggcgaacgccaccgcctctcgaagcaagccaacaatcacggccgccagcccaacagccgaagctgcgagcttgaggattatcacgatagcatccaagcgagtcacctccttcctcaagaagtaggtgccgcctgacgctcaggacttacatccgctgactcgcacacattctaacatgcgtatcgccagcgaaacacatgcatggcaaagcttctatcttcccttgttcatctttgcagcgatttcctccgcgctgagctgggtttcctcgaacacgctgtcggagtcgaggtcgaacgccttgtgcaggcagcgcaccgccgccgcagcttgcgcgccgtccaccacgaccgacaggcggatgggcgacgtggagatggccaggatgttgatctggttctcgcccagcgtcgagaacgcgcgcgccgccacgccgggagacgacttcatgcccgtgcccacgaggctcaccttcgcgatgtcctcgtccacgtcgtaatcgcgggcgctgatgtcgggcaggatgcgctcgatcgtctctttcgcgcgcgccagatcggcgccggggcacgtgaagctgatatcggtgatgccggcttccgagatgttctggatgatcatgtccacgctcaccgcgttgccggccagcgccgagaacaccttcgcggccacgcccgtcatgtcgggcacgccgcggatggtgaacttcacctcggacgtatcgtgggcgatgccggtgatgacggcttcctccatcatgtcggtttcctccttgatataggtgccttcggcgtcggagaacgccgaacgggaatgaatgaccacctggtacttgcgcgcgaactccacggcgcgcatctgcagcacgccggcaccggagctggacagctcaagcatgtcgtcgtaggagatgacgtcgagcttcttggcgcgcgggcacacgcgcgggtcggccgtgtacacgccgtccacgtcggagtagatctcgcacacgtcggcgtccaggccgtgcgccaccgccaccgccgtggtgtcggagccgccgcgaccaagcgtggtgatgtcgccgttggcgtcgatgccctggaacccggccactaccgcgataacgcccctgttcagagcctccatgatgcgctcgttgtgcaccttcacgatcttggccttggcgtgcgtgccgtccgtctcgataccggcctggcgacccgtgaagctcatggccttgtagccgcgcgcttcgatggccatggtcagcagcgtcatggacacctgctcgcccgtggacagcagacggtccatctcgcgcgcgggaggattgtcgttgagcgaggccgcaaggcccacgagctcgtcggtggttttgcccatggcggacacgacggcgaccacctggtgcccggcctgcttcttcgcaatgagcttcttcgcgaccatctggatgcgctcaggcgaagcgacggacgtgcccccgaatttgcatacgattagcgacatggtgctctttctcgtcaggttgaacccaatcggctgtccactataccaaacggtcgcatcgtcgcctatagaaagcccgttaacaggagctttttacatggggaaaacgaagagaacgagcagtcgcccgcatgatgcgctcgaaaccgagcagatcatgcgggcgacgtcccgaaccgaagacagcttcgacgttgctctgcatacgcttaccccgcctggtagatcgtctccagctcgccgctctcaacgagcgtgcacaacgcattgctcgcctgatcgctctcgatgcccatgtgctcgaagcgcttcgccagcttaaggcaatacgacaggtcgccgggctccaaagacagcagggcggacgcagcttgctcgttcagttttccaaacatgagatgctcctttccttttcgatgcatccagcgtactgcaccaaggaaagatggcttttggacgaatggagaacctcgccggtcggttttggccgatcgtacaaacaagcgtcccgacagcttcaaagcgcctccgttgcctcgtgagacagcggcgcgctgcgacttgattcattaccaaaaccatcatggacaaaatatgccgtttttctttattctcattttggaatagcttttcatcacctggggtttcttcgacctctctttcctgctcgctcccattacgcgtcgaaaactactgaaaagtagtgctttttgtccatgatgatttaaatcatattattgcaggcggactggccgagaaagcatcgagcgccgcgtagcgagccgccgccccctgcccttacggctgcagcaaggggttcgtgtagtccagatacacgaggcccagcaggaacgcgaactcgcgatcgggggaatcgggcatgccgagcacgtccttggctttgcgcaggcggtagcgaacggtgttcggatgctgatgcaacgcctcggccgccagacgcaggtcgccgtaggcgcgcgcgaccgcctcggcagtcgcggcaagctcggtgccgtgaagatcgtcgtgctcttccagcaaggccctgtgcagcgcggccgtgcgccagaacaagcgcccctcgttggcggccgcgcgaaacgcatcgtgatgcagatcggcccagcacaccacgcgatcgccctcgacctgcgccgtcttcaacgcggcaagcgcctcgcgcacgctcatgtcgccgtcggaaagcggcgtctcctcgcccactcccagatgcacctggcccgcagccaaaaggcgcatcgtcaggtcgctttcggagcgagttcgcacaccggcaggaggctgcgcgtacgacaccagcgcaagcaacgcaccatggtagcggaaggcgaacaccgcctccaccacatcgtcccaatcgcgcttgaactcggccaacacgacggtcatcgcgtcgagcatggcgtatagggagcattcgtcgtccgctttcggggacgccgctatgcattggacggtcgatccggtcgcccccgcaagctcgtacaacgccgcacgggcagcatgcggatcgtgcccagaaagcaagccgtccatgatgcgccccttatcggattgctcgctgtcgcgccgaatcagatcgagcgcctgatatgccaccacttcgtggtagccgccgtcgtacaagtacattggcacgcccgccgcctcgctggcagcccgcacgcggtcgctgacgatggggcgatacgctttcttcagcgcaatacccgaaacgccgcgcgctatcagaaccagaagcgatcgctcggacaattccggatcgtcgtgtgcgaaccccaggttcgtcacgatgaactcgccgggaatgtacgattcgtagccgccgtccttatcgggagcgcaatcgaggatgcccacgttgtggacttctcgcaactcggctccttcgcacagcaccagcggctgcacctgctcgaacgccggcaacgcaagtatgtccgcaaccgtgatcacgaggagctccttccgaaacctgtcacggacatgatacgacgagtcgccgtcctgcgccacttggcgcatcctgccgttcggcacgaagcatccaacccgactcgcgagaaaaatggacgcgaaagcgcacccatgacaattcccgaggtgttttcgggccgctcgcgccgaccgacccggatgacgttcggcataatgcctggtggcgattttccgcttcggaaaatcgacggttcgccatggcgaactttgtcacagggggccgtttgcgcccagaacgcgcgcagcgagggagggccgtacttgcgacggccctccctccgtttcgccctacacctcgttgaccagcttgaacaccttctccttctcgcctttcaggaaatggacgatgttctcgcagctcaaacgctctagatcttcgatagccgtggtcgagtaaaacgcagaatggggcgtgatgatgacgttgtcgcgccccaccagcttgttcgcggccaagtcgggcgtctcgtcgtacagcacgtccgcgccgaacgcacggagcttgcccgcatcgagcgcgtccacaagcgcttcctcatcaacgcacaggccgcggcccaggttgatgaagataggacgtcgcgccatcaagtcgaacgccgcctcgtcgaaaaagcgcacgttgtcatcggtcaagcacatgtggttcacgatgatgtcggcatgggtcagcagctcttccttgctcacgcgcgtcactccccgttcggcgaacgcagcgtcgtcagcgtgcggatcgcaggctatcacgcgcttcacgaggcccatcgccttctcggccgtgcatttgccgatcttgccgaacccgacgatgcccagcacctgatcctccagacgcggccactggggtgccgcggcgtaatcccacttgtgccgctcgtcgatctccctctggtagaacttgaagtgcttgttgagcgcgcccatgtacgcgatggcgctctcggccacgtcccacgtgcagtactcgcccaccgggcagaccccgatgccccgcttcgtggcctcgtccaggtcaacctggtcgaacccggtagagttcagcgaaaccaccttgagcttcggcgcgcgatccatagcctcggcatccaccgtgacgaacgccgtcagcaacgcatcggcatcggccacatgctcgtagaattcatcacgcttatcgtcctcgtactcgagaacctcgacctccacgtcctcgcccaggcccgcgcgcagggtttcgatctccagcgcgtggtcgggcatcatgcaatcggcgtgatcgcagatgagaaccttcatggcaacccttctttcgtctcgacgaagttacggacgctcgatgggctgggtcaggcagtgaggaccgccgcccgcatgcaggatctggtcgagcggcacgtcgatcacgtccaagcccagcgcgcgcatcttgtcgttgatgtgcttgttcttctcgattgccaccactttgccgttgccgatgcactgcacgttgcagccgtgcttgtacatatcttcgctggccacggggatcagctcgaaattgcgacgcttcagcatttgcaggaagttgtagggcagctggtcgatgcaagccagcgccacctgtggggccacgatgttgaagatcatatcgagatgcaggttgtccggcgggcacggcacgcccaccacggtgtagccgaacttctgcagctggtcgcgcaggttgtccacgccagcttggtcggtacgatccacctggccgaacgccagcgtgtgctcgtcgatcatccagaagtcgccgccctccatgcagcccgcgttcacgcgcgccacgatgggaacgcccatctccttcagcttctcctcgtacgccacggcctccacctgacggaccgggtggcggaagtggccgatcacggcgccttccttgatcatgcagccgtagtcgcgggcgaacgtcatcacctcgaactcggggcgcgcctccacttccaccacttcgataccgttgtctttgaacgcatccaccagcatctgccactcggcaaccatgacgtcgttcttttcctggtcgcccttcttcatccactcggcagtgatcacgttgatgccgttgaactggtagtatcgcggcgagcacatcattactttcttcagggggttcgttgcgttggacacgtagaccttctcttcttcagccatgataggctcctttcgtttgacaggttgtttgggaagcagtttgagaaaccggggcgcgcggggcgccccgggggcagcgcggagagttacagcatcacggccacggtgaggaacacgcagcacaccaggaacaggaagcccacgatgggtgcagcgcgcttcacccagtcgccgtagctcatgtgggcagccgaagtgcaggtcatcaccacgatggacgtgggcgagatcatcttggccaggcccagcgccatgcagtagatggtcaccatgatggccacgtccacgccggcgaactgcgacagcgccgccatgatgcccatggtcgcggccgccagccccgtcgacgagggaatgaggcacgcgatgaggaagtagcagatcagcgccacaatcacgaacgcgacgggaggcagggccgacagcgtgctctcgcacatgtgcaagatagtgggcgtgatctgcccgccgtccatcaccacttggatgcctcgcgccagcggcacgacgaacgcggtggacacgagcccggcagcgcccttgatcagcgtgtcgatgatcttatcggccttgtagcgcatgacgatgcccgcgagcaacgtcatcaccatcacgagcatggcgatctcggggaagtaccacgaaccgaacggcgtgatgtcgctgcccagcacctcgcgcagcaccggcgtgacgccgatccacgacacgaactgctcgaagaacgtccaatcagggttgatggaagtccacggcacgcaccccaccaccatgatggcgaacgtgaggacgaagatggccagcacgcccttctgacggccggacagctccaagttctcgtcagccgaaaccgggaactcgataagatcgagcttgcgacggaagaactggaccgacttctcgggatgagccttcaccttgtcggcgtagcggttgatgatgaagatgacgagtcccgtgaacaccaccagcatcagcacgcgcatgcccatgccgtcgccggccgagatgcccgcgatacccgacgcgatacccgtggcgaacgggttcaccgtcgaggccaggcagccggcctgcgtgcccagcaccacgatcatgatggccaccacggtgtccagccccagcgccaggatcaccggcacgaacatgaggaagtacacgattccttcctcgtaggcaccctccaaggtgccgaggaacgacatgaggcatacaaggatggcgataagcaggtgcatattgttccggttcttcatggtgatgcgcttgagcgccgtcttcaccgcaccggtttcctccatcatctcgaggaagctgccgaacagcaagatggtcagcgagatggcgatggcaccgctgatggcgcccgaacccagcatgcccgtgatgggcgccatgaacacgtcccacaacccttgcgggttggactccacgatgtggtacgtccccgaaatagcgtcgccgttggcgttcagctcgtacgcgccgcccggcacgaaccagctgagcacggcgatgaagcagatgaccccgaacaggatgacgtaggtgttcggcatcttgaatttcttcttgcccttctcgggctcgttgtctgacatggatgctcctctccttgacgcttccggcacagcggggcgcagctgcccaagggtgccgcagaagcggcatcctcgcagaccgagcctgccgtgcgaccctgcgcagagccgcacggcgtaccgggaagcgtgtttagacgcaggggatgtacagatcgcccagggtggccgccatgatggccttgatggtgtgcatgcggttctcagcctgctggaactggcggccgtggtcggagtagaacacctcgtcggtaacttccatctccttcacgccgaagcgctcggccatatcggcggcgtactcggtctccgcattatggaaggccggcaggcagtgcaggaagatgtagtccgggttcttcacatgggacagcagctcggcgttcacctggtagggcgacatgagcttcacgcgctcggcgaactgagactcctcgcccatggccgcccacacgttcgtgtagatggcatcggcgttcgcaacggcctccaccgggtcgttcgtcaccgtgatggtagcgccgctctcggcggcgaaggcccgcgccacctcgacgatggccgggtcgggctcgagttcggccggcgtggcgttcacgtagttcacgcccaggatggcgctggtgatcatgagggagttctgcacgttgttgcgtccctggccgcagtaggccagcgtgaggccctccagcgtgccgaagttctccttcatggtcatgaagtcggccagcatctgggtgggatgctccttgtcggtgaggccgttccacaccggcacgccgctgtacttcgccagatcctcgacgtgctcctgcttgaagccgcggaactcgatgccgtcgaacatgctgcccagcaccagcgcggtgtcgcgcaccgtctccttcttgcccagctggatgtcgttcttgcccagatactcggggtgcgcgcccaggtcgatgcacgcggtggtgaacgcggcgcgggtgcgggtggacgtcttctcgaacaagagcgcgatgttcttgcctgcgaggtagcgatgctcgacgccccacttcttcaggtctttgagatgttcggcgaacccgatgaggtacatcagctcgtctttcgtgtagtccctcgtggagaggaggctgcgtccctggaataccgactcggtcatgtgaagctcctttcgatggatgctcttgcgccctaatccccgacggacgccgcgcccgatggtgcgacccctcctggcaggccaggttacgagaagcatcatacgcagcggcgagagggagcccctctggacagtcggacaaaacccgagccgcgcgctttgtccgaccgaacaagggacacagggcaacaggaatctagaatgaaagcgcgcaagcgggttcttccaacggagcgggggtcgcagatggttctatcgcctatcgactacgtcatcatcgcgttgtacttcatcgtcatcgtggccatcggcttcatcgcggcgcggttcgcgaaaacgaaggaagattacctcgtggccggcaggcggctgtcgtttcccctgttcttcggctgcatggccgcgctcacgctgggcggcggctccactatcggcagcgcccagctgggctacgagttcgggctcggcggcatctggctcaacctgagcatcggactggggctcgtcgcggccggcttcctggttaccagcaagctttcgaagctgcgcgctctcagcgtgaacgaggtggtggagagcagctacggccccatcgcccgcgtgttcagctcggcgctcacgctcatctacacgctcacgctgagcgtggtgcaggtcatctccatcggcaccatcatcaacggcgtgacgggcatcgacgccacgctgtccatgctggtaggaggcggcatcgtcatcctgtacacgttcgtgggaggcatgtggtcggtcaccatgaccgacatcgtgcagttcgtggtgaaaacggtgggcatcctcatcctggcccccatcttctgcatctcggcggcgggcggctgggacgcgctcgtcagcaaggtgcccgaggcgtacctgtcggtgggcagcatgggcttcgacaagagcttcgcctacctcgtgctgtacgtgccggggctcatcatcggccaggacatctggcagcgcatcttcaccgcgaagaacgagaaggtgtcgaaaacgggcaccgtctgcgcgggcgtgtacagcgtattctacgcgctggccaccgtcgtcatcggcatgagcgtgttcgtgctgctgccccacctggacaaccctcagaacgcgttcgtggtgggcgtgtccacgttcttgccggtcggggtgcgcgggctgatcttggcggcggcgatggcggccacgatgtcggtgtcgagcggcaccatcctggcgtcgtccaccatcctgtacaacgacctgtacctgcggttcgtccgcaaaggagcggcccagggcacggcgcacctcaaggaagtgaccatcacgcgtctgttcgccctgctcatcggcgtggtggtgatggtgtgctcgctgtggatcaacgatgtgctggtggggatcgacatctgctacgggtacctgtcgggctgcgtgttcgtgccgctggtggccagtttcgtgctcaagcggttcagcccgaaagcggggctgtacgcgctgggcgcgagcaccgtggcggtgacgggctgcttcgtcgtcgtgggaacagcaagctcagtccccatcgtcgcaggcatggcatcggggctcgtagcgtacgcagcggcgaaccttctcagcaagcagaaggtgccctcgccgtttgaatgaggcgttaacccgttcccttgcctcaccccaactcgggcaggaacaccaggctgagcaggttgatgaacgccttgtcgtcctcatggggaatgcccaacacggccttcatcttgcgcatgcggtaacgcacggtgttcggatgctggtgaagctcctcggcgatagccttcacgtcgccgtgccagttcaccagcgcctcagccgtacgcacgagctcagtgccgtgctcgtcgtcatagccggccagcatcgagcggtacagctcgctcgcgctcatgaacaggcggtcgtagcgcgcggcgctggcgaatgccgacagatgcaggcccgaccagcgcgccagctgctcgccgtggcgctgcgcactcgcggctgcggcaagcgcctggcggatagccaggtcgccatcgcacaggtgcaccgcctcgctcacgccgcagtgcaggctgccttccaccgaggtcacggcgatgcagcggcgctcggcggccgcccgctcctcatcgctggccgagccgtaggatacgaacgccaggatatgatcgcggtagcggcacacgctggccgactcgacgatcgcgcacccgtccctcaccgtccccagcccagaggacaccgagtcgagcatggcgtagaacgagcacgggtcgcccgcgcgcagggcgaacgcgaagcactgcagcttcgagcccgtcacgcccacgagcgcgctcagcctcgtacgcacccggtcgccgtcgtgggcggtcagcagctcgtcgagggccttgcccttgtccagctcgtcgcgatcgcgctgcagcagatcgagcgattggtacgccaccgtctcgtggtaagcgccgtcgtacagataaagcggcaccccgcgcgccgtgctttccttgcgcacggcgtcgctgatgggaggctcgtagacggttttgacggcgatggcggccacgtcgcggcgcagcatcgtcagcagcgacttctcggccatgccagggttgccgaacgcgaacccgaggttcgtgaggatgagttcgcccgccacgtatacactgtattcgttgtagtcgggaggacagtcgaggatgcccacgttgcgcacctcgcgccgctccgctccctcgcagggagcgaccagctccacgttcttgaacgccggcaatgcgataatgtccgcaacggtaaccaacagcccctccgtcctatcgcgcatgagaagcgatcttccaagaagatgcaatacggtacgcatgataccgcatcgcgaggagcgcgttcggacgaccggccgcgcttgacgagaattacgcgtgcgaaccgaaaagcccccccggcctcgatctcgaagaggcgaccctccaggagctaggtcatcctgccgacgtggccgcaaaatgcttcccatgacaatttcgcaagcgttttcgagctgctcgcacccgcaaacacgggcgtcacccaccataatgcctggtcgcaacttcgctgattcgagaattcgccagttcgtgacggcaaactttgccatgggtgccgctttgcgcccagctccgcacacagtccgcaaccgccccgagcgagaggcacctgaacgggaatcctttcgacagagggcggaaacgtcgcttccccacgcgacctcacacctgcgctttgccgggaaccctcgtcttacgaagacgtaagctgagtgtaagcggcggtcaaggtgtccgtcatgcgctcacggtatagttgaacccgtgaacgcacgatacgaggagatcgccatgagcaaaccgttgagcatcgcctgcaaagccgtcggcgcaaccgtcatcataggagcattcgtgctggtggcctgtctgttctcggagagcagccgcaccatgtatccgatcagccgcacccgctgagccccaaccggcgaccagccgcccgcgccgcggaggccgtaaaacccgcgcgccgcatgctgcgcgaacccgcgcgccgcgcgctctactcctgcttttcaggcatcctccacagcagcacgaagcccagcacgaacagcacggcgatggacagcacgcccaacgacgagttgcccgacagctgggtgaagaagctgaccaggaacgtgcccatgacggcagcgtacttgccgaagatgtcgaagaagccgtagtactcgttggcgtgctccttcggaatgagcttgccgaactcgctgcgcgacagcgcctggatgccgccctggaacaaccccacgcagatggccagcatccagaactccgcggcctcgcgcaggaagaacgccgcgaacagcgtgatgcagaagtacgcgccgatagctaccagcagcatgcgcttcgtgccgaatcttgtggacagacgcccgtaggcgatggccgacgggaacgccacgaactgcgtcaccaacagcgccaaaaccagctgcgtcgcatcgatgccgaggtcggtgccgtagcttgtggacatctttataatggtgtgcacgccgtcgatgtagcaaaagaacgctagcatgaagtagcgcaggcgacgatccttccaaatacgtttcagcgtgcggaagaggccggcgaacgtgtcgcggatcaagcgaggagcacgttccttgtagtgcgtctgatgcacatcgcggataaggggcacgctgaacgccacccaccaaacggccgtgatcagaaacgcgatcttcatcccgatgtccatagggatgcccacgctgggccctgccaacaccacgatcaggcacagaatgaacggcacgcacgagccgatgtagccccaggcgtaaccctgcgacgacacctcgtcgtaacgctcgtcggtggtggcgtccacgaggaacgcatcgtagaacaccatcgagccgttcagcatgatggacgcgacgacgtagatcacgaggaaagccagcgcagccgacgggatgcccagcgccgccaaggcgatggcgcccgtgcccacggttccgatgaagaacttcttcttgttgcccttgaggtcggccaggctgcccagaaccggcatgagcagcgccagcagaagcgacgccaccgtctcggcatagccccacgccaccacaaccgacgaacccggttcggccagcgtcttgaaatacacggggatcagcgccgtcgcgatcagcacgaaggccgaattgcccacatcgtagaggatccagcttttctcctgcttggtcagcttgcctgccatggccttgcctctcgtctcgtttgcgtcaacttgggattccttcttcacaagtgcgaaaccgaaggttaacaagtccccgctcattgtatatgatagcgcgtagcgtcaccggtaaaattcaagtcagaacggagcgtcatccccatgcccgcactcatcacccacgacttcttcgggcgcgacgtctacgaccgcctgtacaccttcataggcggctcgcgcgacgaagccgacgccttcctgttgggcaaccaaggccccgaccctctgttttacctggtgctcagtccgcagttgcgcgcgcacaaccgactgggctcgactatgcacaataaaaagcccagcgagcttctaaccgcgctcaaaaactccctcggcatcctcaacagcgccgagcgtgaagtaggtcgcgcctatgcgttgggtttcctctgccactacacgctggactccacgatgcacccgttcgtgtacttccacgagtaccggttgtgcgacgccggcgttccaggcctgacgcgcgccgacggaagcgaagtgcacggcacgatcgagagcgaactggacgaactcgttctgtttgagaagcgcggcgagaccatcgccacgttcaacccctccgccgaaatcctcaacgccagcaacttcacgctgcacgtcatctcgaagatgtacgcctacgtcgccctcaccgtgtacggcgagatcgtccccgccgacctgttcgagacggccgtcaaggacttccgcgtggcgcagcgcgtgttctactcgccctccggccgcaagcgcgccctcttcgggcgcgtcgaagaactgctgcgccccttctcgttctacaagtcgatgagccaccgccccgtcgcgcttaccgaaagccagttcgacaaccgtgcccgcgagacgtgggagaacccgttcacgggagacatgagcaccgcaagcttctgggatctcttcggcgaggcgctgggaaaagcgcaagacaacctgttcgcattcgacgaggacggattcgatctcgcagcagcgcgcgccatcaccaacgagcgagacttctcgggcgaacccgttgtggcgctcgtggtgtcggtcgaggacggcgctgccgacgcgcagccgcagcccgccgacgaagcgtaagcgccccatgctggacgtcgccctcaccatccccttctggctggagcttgccgctgcgctgaccggcggtttgtccggcgccatgagcgcagtgcgcgcacgctacgatatattcggcgtggcgtgcatcgccattatcaccggtttggccggcggcatcatgcgcgacatcctgctgcagaactacggtatctacgcgttccagaagcctacgctgatcatcgcctgcgccatcgcgggcgtggtggtgttctacttcggtaagctggccacctatctcgaccccatcgtcgacttgctggacaacctgtcggtagcgctgtgggccgtgatcagcgtgagcaagagcctgtcggcggggctcgacatcatcccgtccatcatcctgggcaccatcaccgccgtgggcggcggcatcctgcgcgacatctgcatgaaccgcgagcccgaggcgttccaggccggcgcactgtacggcagcgccgcgctggtgggctgcatcgtgtacgcgttgatgagccagaaccacatcctggacaactacgccgcgctgtcctgcgtggtgctggtgctggggctgcgctacgcgtcgctgttcttcggctggcgcacgaagccgccgcgcgactactccgacgtggtgacccgcgcggtatcgaagccggtacgctcggtggcgaatcgcgtgcggccgcccaagggcaaggtggagcgcgacaaggagcggcacggttacgagaagctgcgtgcgttctgggcgcgcatgaacggcgagtacgtggccgagcgcagcaaggacgacaagcttgccgcatccgactcgcaagcggccagatcgtcggccggcaccgccgcagccagcgaccccagcgaccgcatcatcgtggaccgcgaggagctccaccgcatcatgggcggcgaggaagagaaacctcgcgaccccttcgagccaagaagctaaaaccaagccaccgtgtccagcgcgtgtcgaaaggacgggggatctgacacgctcgcgacaccgcgcctcgcaaaacgggaaaaagcgtgtcaaaccccccgtcccttcgacacgctttccttcggttacacgttcttcagcaggatggagttcatcgtgtcggcggcgtgctcgcacgagtcgcagcacttctccatgcggtcgaatatctgcgaccacaccagcacgcgcatggggttctcgcggtcgtgcgtatgcagtttgcgaatgaccgtcatgtacagctgatcggcctcttcctcgtaatcgttcacgtcgatgatgagctgcttgaacatcttggacttcttgaaattgcggaaatcctccatggccttgtccagcgccacgcagctcttcttgatgaggtgcgcgaactccagcgcatcatgatggatgaaatgcacgtcgtacatgtagaagcgttgcatgacgtcttcgatgtagtcgatgatgttgtcgaggtactgggacatgttgatgatgtcctcgcgctcgataggcgtgatgaaatcggtagcaaccgtcttgaagatggcgtggttgatctcgtcgcccttgtgctccagctcgtgcgcgcgctccatgacctctttgagatgctccgcctcggtgaagctttcgatggcctcgatcagcagctcggcttcctgaacggcaacttccgtctgtttctcgaacgcatcgaaataatcgaacttgtccctcttgcccacagggtcctcctttacgagaacattaagaacaggtgggcgaacgcgaatccgagcagaccgcaccccggaaacgtcagcacccacgttttcaccatatcgattgcaattccccacttcaccgcgcttttccgcttcgctgcgcccacgcccatgatggcggtcgtattcgtgtgcgtcgtggaaaccggcaagccggcgaaggtggagagcataaggcagaaaaacgttgccacgctggcggcgaatccttggaacggctcgagcttcaccatatccaggccgacgctttttatgatgcgctcgccgccgacggcggtgcccaaccccatgttgagcgcgcagaagaacatgagccagatgggcaggatcatttgatcggcctgccccacgcccgtggccaacgtgatggccagcacgaagatgctcatgaatttctggccgtcctgcgcgccgtgcatgaacgccacgcccgcgcccgaggccacctgagcccaacggaagaagcgcgaagtcttcttgcgatccatgttgcggcagacgcgtccaagcgccttggagttcagccaacccagaaagaagcccagcagcgtggacaaaagaatgccgtacaccaccttgatccactccgcgccgttgatggcgtcgaagctgccctgcagcgcgatggccgcgcccgtgaggccggcgatcagcgaatggctttggctggtgggaatgccgaaataccaggccacggtgccccacacgatgatggccaccatggcggccatgagagcgatgagcgactgctgggagtcgcctccgaaatcgaccatattgaatatggtgtgtgcgacggcggcggtaaacagagaaaccaccagcagccccaggaagttgcagacagccgccatgacgatggcgggcttcggcttcatagcccttgtcgatacgacggttgcgatcgcgttcggagcgtccgtcgccccattcacgacgatgacgccgatgttgagcagggtcacaaccacgaggatcgggttggacgcgagcccagcgatgaacgaagcccactctatggtcacgaaatccctctcgacaacaacagcaaaaaggttcagcattccccagtttaacgtaaatctaacaaagcgaaaggggctcttttctcttttcacgttggattacgggcgaaacggcaaaatacaggtaaagtcacgccccggcaccgcctacgggtaaaacccctgcaatcggtaggagttaacccccgctctatcgatacgtgataaagtaaccgttacgcaagaagaggtttccgcgtcgccgcgtcgcaagcacggctcgacgacgcctggggggaggaaatcgaaatgagaaggcgcttccagctgcccttgcagaccgcggatctgatcgccggattcatggtgtgggtcatcctgtcgtcgctgcttccgtacatcaagcaggacgtctatatccctcccgaccagatagccctcgtcaccgccattcccgtggtgttgggatcggtgctgcgcgtacccttcggctactgtgcgaacctgttcggcgctcgtgccgtgttcctggccagcttcatcgtgctcgtggtgcccgtatggtttttgagcgaggccaccacgtatcagggattgctcataggcgggacgtttctgggcatcgccggcgcagtgttctcggtgggcgtcacctcgctgccgaagtactacccgaaggagcgccacggcttcgtgaacggggtatacggcttcggcaatatgggaacggcgctgaccacctggttggcgcccgtggccgcggttgccttcggttggcgcatggccgtcaagctgtacctcgtgctgctggcggcgttcatcgtgctgaacttcgtgctgggcgatcgcgacgaaccgcgtgtgaagacgccggtcatggagcagctgcgcgccgtctggagcgacgcgcgcctgtggttcctgtcgctgttctacttcgtgacattcggcgctttcgtagccttgaccgtgtacctgccgaactttctcacgtcgcactacgggatggacggcgtgtcggcaggcgtggccacctcggtgtttatcgtggcggcggccgccatccgcgtgctgggcggctggctgggcgaccggttcgactgttatcggctgctggccctcgtgttcgcaggcctcgccgcaggcgccgcggtgctggccacggcaccggggctgcccgtgtacctggcgggcatctatctggtcagcatcgcatgcggcatcggcaacggcgtggtgttcaagttggtgcctgcgtacttcacgaagcaagccgggattgccaacggcatcgtggccatgatgggcggcctgggcggcttctttccgccgctcgtgctgtcggcatcgacgctgctgttcagcacgagcgtccccggatttgccgccttcggcgccttcgccctcgcctgcctggcgatttcgctggtcatgaggaggaagactcggtcatcctgagggcacggagcgcgcaatccgtctcctgagcgtaagccgcgaccccctacgcgtagtaagcgaacacccttttgcgttcgttgccgatcttggtggtgctgttgtggccgggcaggaccaccgtctcgtcgggcagcacggccaggcgcttcagcgagcggcgcatagcgttcatgtcgcctccctggaaatccgtacggccaatggagccgcagaacagcgtgtcgcccgaaatcagcaccggcgcgccttcagggttcgtgccgaagcgcgggtcgatgaacaggcagataccgccctcggtgtgacccggcgtcaggatcaccttccacggcatgtcgccgatcttgagaatgtcgccgtcgttcactacatgatccaccgggcacggcgtgaagcgcatgtcgtcgcgcggcagcttcttctcgcccgaaatgatgggcgcgtcgatggccgaggcgatgaccgtggcgccggtcttgtcgcgcagctccttcgcagcgcccacgtggtccgaatggcgatgcgtgaggatgatggcgtcgaccgagccccccgccgccttgatgatctcgtcgggcttgcacgtgggatccaccacgatggtggccttgccgtcggaaatgatgtacacgttgttctccagcatgccgagcacgaggtactcgacgggcacgcacgtgcccttcaccttattggtcatgcgtcgctcctagtctttttcttgccgccgccggccttgggaaccatgcggcgcgcgtcgaacactccttcgatgccgcgcagtttgctcagtacgatatcgatatggttgatatcggacacctggaacaaaaaccgcatctccaccatgccgtcgcgatgcgacgtggtggagctggacagcacgttcgccccttgctccgacaggatgatggccacgtcgcgcagcaggttcatgcggtcgagcgcgtccaagaacacctccaccttgaacgacgtgttcttcggcagatcgttctcccaggccacctcgatgatacgctcgggggtttgcttgagatcctgagcgttcgggcagtcggcgcggtgcaccgacacgccgcggccgcgcgtcacgaagccgagaatctcgtcgcccggcaccgggttgcagcaccgcgacaggcgcaccagcacgtcgtccacgcccttcaccaccacgccgttcgacgtgtgcgcctcgtgcttcttcggcgccttcacgctggtcagcatcggcggcatcttgccggtggacatgtcgcctgccacgtagtccatggcggtctcggcctcgtggcccttgtccacgaggatcttcagcagacggttcgccacgtgctgggcgctttccttgccggtgccgatgtgcacgagcatgtcgtcggcgtccttgtagcccatgtggtcggccaccgacttgagggcgcgcatcgactgggcgctggatatgcccagaccgtgcttgcgcatctcgcgggtcagcttgtcgcggccgaattgcaaatcgtcgctgcggctgaccttgctgaagtacgagcggatcttgctgcgcgcgctgggcgttttcacgatgcccagccagtcgcgcgaagggctggcgcttttctgcgtgaggatgtccacgcggtcgcccagctgcagctcgtaggtcagcggcacgatggcgccgttcaccttcgcgcccacgcagtggttgcccacctcggtgtggatggcgtaggcgaaatcgaccggcgtcgaaccagcgcgcaggctcatgacctcgcctttcggcgtgaacacgaacacctcggtgggcgcgagatccactttcaggtccttcaggaactcgcgcgaatcctgcgactcgtcctgccagtccaccatctggcgcagccacgccagctgctggtccagcgcgtcgccgctcttgccgcccttctccttgtagcgccagtgcgccgccacgccgtactcgctttgccggtgcatgtcttcggtgcggatctggacctccagcggacggcccgccggcccgatgaccgtggtgtgcaggctctggtacatgttgaacttcggcatggcgatgtaatctttgaaacggccgggcatcggatgccacagcgtgtgcaccgcgcccagagccgagtagcagtccttcaccgacttcacgataacgcgcacggcgatgaggtcgtatatctccgaaaagcccttgcccttcttcgtcatcttctggtagatggagtagaggtgcttcgggcggcccatgatctgcgcctggatgttcaccttttccatctcgtcgtgcaagatggagatgatctggtcgagatagccctcgcgctcagagcggctttcagtcaccatgcggctgatctgcttgaacttgttcggttccagatagtagaacgacaggtcctcgagctcccacttgatgttgttgatgccgagacggtgcgcgatgggcgcgtaaatctccagcgtctcgcgcgccttgaagatgcggcggtcttcacgcagcgcgcccagcgtgcgcatgttgtgcaggcggtcggccagcttgatgacgatgacgcggatgtccttgctcatggctacgaacatcttgcggatggtggcggcctgctcgtcggtgaggctttccacctcgatgcgcgtgatcttcgtcacgccctccaccagctgtgccacctggggattgaactccgcttccacctggtcgcgcgtcacgctggtgtcctccacggtgtcgtgcagcagcgctgcacacagcgtttccacgtccatgcgcaagtcggccaggatgatggccacctccacgggatgtgccacgaacggctcgccgcttttgcggcactggccctcgtgcgcctcgcttgcgaatcggaaggccttcgccagcatggcctcatcgtcctcggacaggtacaccgaggtcaggcgctgcagctcggcgaatcgctcctcgggagtcttcggcgcgagggcgtccttcttggcttcgggcgcgaacgatttctcggccacgtgcggccggcccagcaggttgtcctccacggtctgcttgttcgacgtcgcctcgggcgcgccgcccagcagctcctcatggttgctcttgcccattttggtcgtcctccctatgccctagcgctcgcgcgcgtcgcctgccgcgtcacccggcaaaatgggccgcgacacgcgtatatggagggtagcagaatcgctcttcatcgcccagtcccggaacgcgtggaacacctcgcgctcccccaaaccttcacggtagcgtacgctgtccgtcaactccaccttgtcctgcgtctccaccacgtggatggagcgcgccatgccgtcggcgccgaacgcggtgtgcgtctcgataagcccgagctcgcgaaacaccgccacgccgcacgctgccgaggcggggctgatagggaatgcatcggtgctggccgccgcggccagatcggcgttgcccatggtgaagaagcactcgcccatctctcgctgcagactgcgcaggcggcggtacacctgggccaggcagtcgtggtcgggcgtcatgtcgcgcaggatgcgctcgttgagcgagcagtcgccgcggttgaacagtaggtggatgcccgcgggcttgccgtcgcggcccgcccggccgctcatctggttgaactcgatctcgttgaacggcaggtggtacagcaccacgtggcggatgttggggatgtccacgccctcgccgaaagcggacgtggccaccagcaccgacagcgcgtcggtgcggaacagctcttcgatgcgcttgcgctcggcgcgtgcgaggcccgcgttgtagaagccgatgagcggcgccagctggggcacccgcttgcgcagagcgcgcgccacggcaaccgactgctcgcgcgagttcacgtagatgaccgtcttgccgcccgacgcgatgagattcgccaggtagtcgtcgcggttcttgaggttgcgctggtcgtccacctcgaggttgggacgcgaagccgggtcgtacacgcaggcgtccaccggcagctcgcgcttgatggcggccgccacctcgtcgtcggccgtggccgtaagcgccagcaccgcgggagcctcgccgccgggcccagccagcttcgcaatggcggcgccgatggtggcgtaggccacgcgctggcccgccttcgccaggccgatatggtgcgcctcgtccaccacgacgaagcgcacgcggcccgcggccgcgaactcgtcagcgtgccacgcaaggaactcgggcgtggtcagcacgatgtcgtaggtgccgtcggccaggcccgcgaagccctggcggcgctcgtcgggcgtgctctcgcccgtcagcgtgatcacgccgataccgaacgcgtccagcgcctcgcgcaggtggaacgcctgatcggcgatcagcgcgcgcagcgggtacacgaacaggctggcctcgtggttcgccagcgcgcgcgtggcggcgtgcacctggaaggtcagcgatttgccgcgccccgtggccatgatgcccagcgtggagcgcccggcgcgcagatgcgcgaggatctcgcgctgcgcgtcgtgcagcggcttgtcgccgatgatggcgcgcacgacggcctgctcgagcgccgcggggtcttccgcggccttgcgctcccagcaggcgcggttcgccgcgcgggccgcctcgtaggcctccacgtcctcggggcgatgcggcgcgttcgcgcacagctcggcgtcgctcgtggcgtacaggtcggccacgaagctgaggttctcggggttgaggcaggcctccagggcgccgcaggtgcgcgcgggagccagcgactgcagcatggccttcaccgacttgcggccgcgccattcgtcgatctgcacctcgaacgcggcgttcaccacgctgtcggtgcgcatgagcgattcgatgtccgagcagtggaacatgatgcccgacaccgtggcgcgcccgtcggacagcgagcacgagaagtggttcttctcggcgcccaccgcgcggcagttcgccagcatcacgtcgcgcgccaggtacacgggcacgggatgctcctggccgaacggcgccagcttgtccagttgcgccacgttgtccagcgtcagctcatcgaggctgacgcacgagtcgatttccacgagcggatggaacgcgccctcgggcagcgcgtccatgtaggcgcacaggcgccgctcgaactccggcagcttgtcggccggcagcgtgacgcccacggccgcatcgtgcccgccgaagcgcgtgagcaggtcggatgcgctttccacagccgagaacaggctgacctggcccacgctgcggccgctgccgcgcgcttcgtcgccgtcgatggtgaacagcaggctgggcacgccgtacgtgttcaccaggcggcttgccacgatgcccttcacgccctcgtgccagctctcgcccgacaccaccagcgcgcgctggccgtggtagatctcggcggcctgcgccttcgcgatctcggacagctcggcttcgatggcgcggcgctgatcgttcaccgattccagcttcgtggccaggcggttcgcctcctcgaagtcgtcggtcatcagcaggtcgagcgccagctgcgcgtcgcccatgcggccggcggcgttgaggcgcgggatgacggagaagctgaggttcgtggcgctgacgggcttgtcggccgcgccgctggtggccagcagcgcggcgatgcacgggcgcggcgcggcgttcatgcgcgcgatgccgtcggacacgagggcgcggttctcgtcgcgcatgggcatgaggtcggccaccgtgcccagcgtggcgaagtcggtgaagtcgcgccataggtgcggctggcccagacggccgcccagcacctgcaccagcttcagggccacgcccacgcccgccaggatggagctggggcagttcgcgtcgcacttcggatcggccacgggcacgccttcaggcacaaggtccaccggctcgtggtggtcggtgatagccaggcccagacccgcctccaccacggccgcggcctccgccttgcaggcgatgccgcagtccaccgtgacgatgaagtcggggccgaacgagcacgcgcgcgtgatggcggcctgcgacagcgcgtagccctcttcgaagcgcagcgggatgaacggcgtggcctgcgcgccgagggcgcgcaaaccgcgggtgagcacggtggtggccgagatgccgtcgagatcgaagtcgccgaacacgaggatgtggtcgccgcgcttgacggcggcttccagggcatcggccacgtcggacaggccggggatgatgtaggggtccagccagtcgcgctcgagcgacggcgcgaggaaacggtgaaccgcagcggggttgtcgatgccgcgggcgaccagcgtcgctgcgatgaagcggggcagaccgagttcgcgctccaggcgcacgacggacgcggggtcggccgctttgatcttgaactgggcagacatggctctcatacctcacatgcgcgaattcgaatagttcacgtcccattgtcccacaatcgcacggcgaagtcaccggcaaaggagcgggcggcgcgggcgggatcccgcgatcccgcatcccaaccccaggatcccgcgatcccgctgcgaacgcacatctccgcgacccccgccgaccatacttcgccgttgtgggcgcaaaacggcacccatgacaatttccagcgcgattcttcgacgcttcaacgcctacagctagcaaaaccccaggtggtgaacaacccgcatgcccgtccttcggtaaaatcgccatcagaattgccatgggtggccttttgcgcccacgaacaccggggcgctccaatcgaatcgcccgcatgacggcatgcaggcgcctgggcgagcggcgcgccgatctagcggaaacctcgcacggccctagcgcgaatctaacggaaattccacgcggatctagcgccgatctagcgcgcttctcacgtgaatctaacgtataacgcctgatcaaacatcatttttgctcttccattacccggcttgccatggtacgctggacgcatggaaatcgttctcggacatacctcgtcgatggagttctggcgcgccaagcgctcgcattcccaaacgcgcgcgctgctcgctcgccgcggcgagcctcggagctttcgctcggattcgcctgacgtagccaagccgagcgcaggcgatttggaacggctcgagcgcatcgggctcgcgcaacacgcgaaccccgcgcactttatcgtccccaacgcgctttcacgcgtgcgcactgcacgcataacctgcagcgtgttcgaccgaaggattccctcatcggctttcgtcaacgtgggcgacggggtgttcgtcgcctcgcccgaactgtgcctgctgctcgaagcccgcacggccgctttagcgaacctcgtcgaaacgggctacgagttctgcggacgataccggctgcctgccctgccagacggcaacatggcacccgaccagctccccctgacctccgtgccgaagctgcagtcgctcctctcccgcacgcaagatgtcaacggcgtcggcgcggcgagaaaagccgttccgcacatactccagaattcggaatcgcccaaagaatcgcagctttccatgctcagcagctttccgggacgcctcggcggctacgggtttcccccggcaacgctgaaccaccctgtgcgcatctcggagaacgcgcgcggacgggacgtgggccgaatatgccgctgcgacctgttctggcccgacgcgaaactcgatgtcgagtacgacagccggctgcaccatgcaggggaggccgagcaggagaaggactcggctcgcagaaccgcgttggcgtacgcgggcatcctcgtcatcaccgtttcaagcgaccaactgcacacgaggtcggaaatggacaaggtcgcccatgcgatggcgaaacggctgggaacgagatgtcgctcccgagcgcacgattgggaactcaagcagatcagactacgatctcagctgcttggcaccacgcgaccggaaatgctgggcgcaaaacggcacccatgacaataatcggacgcttaaagcgcgctcgcccgacgcgccgtcggcaaaaggcctggtcgcgtttcgcaacgaagccgaagcgacgcgccaaccgccaccaaaattgccatgggaagccatttgcgcccacgaagcaagcatcctcccagctcggacatcgcgcttcccctacatctggtcgatcaggaccagcagctcctgcttcttgtggatgtcgagcttggcgtagatgcgcttcgagtgggtccgcatggtgttctcggaaatgaacagcatctcggcgatggccgggcccgagtagccgcgcacgagcaactccatgacctcggcctcgcggctggacagaccgtacagctcgctcaggcgcttgcagcgcttcgacacgcgatcggcaagctgcggcccgtggcagcgccggccggcgctgccacgtcgcgggagcgcaccgcctgcgtcacggcgatctcggccgacgtctccttctgcggcgccttcggcgtgagcatgaggaactccaggcggttcgtgtgcagcttgcccaccttgcgccccaccagcgcgatcagcagcatcacgtacagggccaccaacgccacgaacgacagctgctccacgccaagcgccgccgcactgcccgaggcgtagcccaccaggtagccgcacatctgcatgaagtaggtgatggtgccgtagaacgcgaagatgaacaccgggttgatgccgctatcgcgcgagatctggccgcaatgcatcatcatgagcacgcacgccagcatgaagcacgcgtacgtcacgccgcttcccaccgtggtgaactcgcctcccgcgaacggcagcacgatgaggcacgtcgccgcgatgggaaacagcacgcggaacacgctcatgaggtccacgtggatggtgcgccgcctccatgccccgtaaaacacggccaccacagccagcagcgcggacatcgagaagatgttgatggtgctgagcagctcctggtgcgtgaccgcgatgaagcggatggcgcccgagcagaacccgagcgcgcccaccgacagcgccggcaggaagctttcgcacagcgcgttcttgtacaccaccgcgtgctcgcgcggcacgtcgtcgaacatgggctgctgcgcgtccgtcgcgtgcgcggcgatccacaggcacagccccgccagcggcaccagcaccaggggtataaggtaagcggtgagagccgtggggatgaagcacaggaagaagtacagcagcgccgagaacccggtgcccttgatgagcgcgaggttgccgcgcgcgctgtcgagcgaggcgaacacgcgctgccagctcatgaggtagcccgccgaccccacgccgatgagcgccgccgcgcccaccaccaacgccagcgcaagcgattccaggtacatggcccccaccagcatgagcggcccgaacgcaagcggcgccgagaacgccagcacatgcgccccgcgggagaggccgggacgcgcccacgtgaaggccatggccgcgcagaacgccaaccagaacacggcgatctgcaccgtgtagaatacgatggtggtgagcgacgtctggcagaacgcaggcaagtaggggtagatgccgccccagatggacgttgcgttgatggacagaaacgtcgcgtacccgaagcttggcacgtccggtttcaatgctgatggagcgcgcatgtgcgagtgtccccctccgtttgccgtagggtcattctagcagacgcaccggggacggccggcggacatggtgacacggtgatgcatttgaactgggaaaatagaaatatcacaacattctggtgacaacatcgcgagcggcgagcacctatagttcaccgcagacggagaggccgcgccaccgcatgagcggcctcgcatgaaacgagaatggagggggttgcatgtcaacagatcgcactgcgctgacccgccgcacgttcgtcgcatcggccggagcgctgggagcgctggccgcctgcggcaccgcggcgaacacgctgtacgcgtcggcgccgcaggcgttcggcgacgagagcggcgacggcgagagcatcgatgagctgcgcgaggacaagcccgagctgcccacgcccgctcgtcgcgggatcgcgctttgtcacgttgcggccatccacgagataccgcacggtcacccattctcgaaatcatcctcatgcacatataatcttcgtctcagtataaaccctatcgggcgtggcgtaacgcacaagcttcatgacccctccacggattcgcatggtttcgtacacgagaatgcacgagcttgaacgaaacgacacgaaccggggtcatttcccacggacttcttccacacggcgtccgaacccgcgacactgtgaccatgccgaacgggctccggagaagccggaagcccccaacgaaaggaacctgctatgaagatatccgctcgcaaccagctcaagggcaccgtctccgccatcgccgagggcgccgtgaacggcgtcgtttccatcgacctgggatctaccatggtcaaagccgacatcaccatggaagccatcaacgatctaggcctcaaagagggcaccgacgccatggccatcatcaaggccagcaacgtgatgttcgccgccggctccgagcgcatccagggcatctcggcccgcaaccagatcgccggaacgatcgcgtccgtgaagaagggcgccgtgaacggtcatgtggccatcgagacccccgagggcgcacgcatcatgggctccatcacgaacgaggccatcgaggatctgggtctcgccgagggtgctgccgcgctcgccatcgtgaagtccaccgacgtcatcgtgggcgtggagtaaccgcttccatagcatctgcgagcgacgctcgcacccgcaaggccgcgtcctgcacgcggccttgctgcatttccggatcccctttccgttccgcgctttgcgcggcgctctctttccttcccgttctgggccatcggcgcagccttcgcggcttcgaggctgcgcgcacgccgcccgcgaagcgcattcgctcaaacgaactttttcgccttcctcagaacaatctcacactctagcccgtattgttaccagagaggtgaatgcatgcgcttgccgttccagcgaaaaaaccagcccgccgcagcccgcgacagcccgaaaccgcttcgatccgacgcgttcttgctcgaagccatggacgcgtggggcgatgtcgtgtatcgcgtcgcgctggcgcagaccggctcgcccagcgacgccgacgacgtgttccaggacgtgttcatgcgcctgctggaacacgacaccgcgttcgaaagcgacgagcacctgaaagcctggctgctgcgcgtcacggtgaaccgctgccgcgacttggcgcgtttgacctggaaccgccgcacggaaggcttcacgcgggagcatgccgacatccccgcccccgacgcgttcgacgccgacatctgggaggtcgtgggcgcgttgccgcccgacctgcgcatcccggtgcacctgttctacgtcgagggctacgccaccgaagagatcgcgcgcatcacgggatgccgacccagcaccgtgcgaacccgcctccaccgcgcccgcgagcagttgcggaacatgctggaagacgaccgcggccaacgcgagtcgagccttgcaagctgccgcgaccccctatgccgaaaggagccgaaccgtgaccgatccccgcaaccccggcccacgcccaaccgtggatgagtaccgcaccatgatgcgaggaacgcacgtcccggaccagctgaaacaagcgaccctgagcgaagcgggcaggcgccggggccgcagcgctaaaaccgtgcggacccccgtccgaacaggcgcgtcggtcaggcgacgctcggcgctcgggttcgccgtcgccgcctgcctcgtgctggtcgcgggaatcggcgcaacggctttcgcgatcaacggccccggcgggttcggaccgggaaaaaccgtagagctggagtcccaagacttcacgggaggcggcggctacagcggtccctggtacaacccagccgacgacacgttctggagctacgaatgggctggatacaagtatcatttccctgtgcggtgcgtcgggaacaacatcgaatccgtcacctacgaaatcgaaggcgagcgcagctacttcgagatcatcgataacaccgtcaccgccgagcagcacgacaacggcaagcacgtgttcaattacaccaagtccgttacgttcgactacgaccatcaggagtcgatcgacgaccagcgtatcgtagaaatctacatcggcttcccccttcccgaagaggggaaggaagcgtacgaattggcccttgccggcaaaaactcgctcgaagcgagcaggcagctgaataccgccatcgaaaaaggcgcggctcgggaaatctcgacctcccgattgaagctcaccgccacgttcgccgacggctccatgcaaacgaaaacgtaccgcatcgctccggtgcccgatttcgacgaacgatacgaggcctattccgatgcccgtgccgcatttcagagcatcgagcctccttcaagcgacgcctcccagcaggagatcgacgattacctcggcaagatgcctcaaatgcccaagctttacaacatcaccgagctcaacgaagggtgaacgccgcgttggaacccgcgcgccgcagtatctttttatgaccaatatagtcatggacaaaaagtgccgattttctttatcctctatgaagataaggcaaagcggtgcgcttctcaccaggcatgatgggaattgcctgatgctcgatccctctcttttaggtcaaaaaactacagaatactatagctttttgtccatgatgaattgacttatattattttgctgcgacccaaacgctcgcattaccagtcgcatgctagcattgaggaagcggtcgccccacccgcaggaaagactcgcgaaacaaaccgcgtcgacacggtgcgcagcaaagcacccgcaagctttgccatccccatactgcacctccccgcatgcaaaagggccggatccttcgatccggcccggaagttgctgggcgcttgctgctggtatgctgatgccgcgttcgcgaatgtggtgacgggtacgccctggtttcaaaccgaccgaagccggcggttaggcggtcacctgcgctttcatcgcattgacgtgctggaacacggcggcggcgcccgggatcacgtccacggagccgtcggcggccacggacagcagcgtgggcgcctgcatgatgcggtagcgctgcgccagctccacgttctcttcggccagcagctcctcgtagacgatgccggcggcatccatttcagctgcggcgaatttgcagttcgggcacgtccgcgtggcaatgaggtagaggcctgcgggaagcgtgctgtggtcgggcgcagaggctttctcgatgcccggaaccgtcacgtgcgagcccgcctgcccgacggtctcggccgcggccgtcacggctacggcgccgtctcgcgtcaaatgcgaatgccccaagtcgtactccacacggtcggcgaactcctgcgacttgccgtcgttccagttcttcaccgggcggtagtagccggtgatgcgcgagtacacctcggtctcctcgtggcagcacgggcactcgtacacctcgccggcgatgtagccgtggttcttgcacaccgaatacgtgggtgacatggtgtaatacggcagcttgtagttctcggcgatcttgcgcaccagcgtggcggccgccttccagtcgggcagcttctcgcccaagaaggcatggaacacggtgccggacgtgtacagcgtctgcagctcatcctgcacgtccaacgcgctgaagatgtcgtcggtgaagcccaccggcagatgcgacgagttcgtgtagtacggcttgccctgctcgttggccgtgatgatgtcggggaactgctccttgtcgtgcttggcgaagcggtacgtggtgctctcggccggcgtggcctcgaggttgtacaggtcgccgtactgctcctggtagtcggccaaacgggcgcgcatgtggttgagcacgtccttcgtgaacgcctgcgccggctcctgcgtcatgtcagcgcgcagccactgcgcgttcaggcacgcctcgttcatgcccaccaggccgatcgtggagaagtggttctcgaacgtgcccaggtagcgcttggtgtacgggtacaagcccgcatccagcaggcgcgtgaccacttcgcgcttcgtgtgcagcgagcgcgcggaaacgtccatgagatggtcgagtcgacggtagaagtcggcttcgtcggcggacagataggccaggcgcggcatgttgatggtgaccacgccgatggagcccgtggactcgccgctgccgaagaaaccgcccgacttcttgcgcagctcgcgcaggtcgaggcgcaggcggcagcacatggagcgcacgtcggacggttccatgtcggagttgatgtagttggagaagtacggagtgccgtacttcgaggtcatttcgaacagcagccggttgttctcggtttcgctccagtcgaagtcgcgcgtgatggagtaggtggggattgggtactggaagccgcgaccgttcgcatcgccttcgatcatgatctcgatgaaggccttgttcaccatatccatttcgaccttgcagtcgccgtaggtgaagtccatctccttgccgcccacgatggccggctgatcgcgcaggtcggccgggcacacccagtccagcgtgatgttgctgaacggcgcctgcgtgccccagcgcgaaggcgtgttcacgccgaacacgaacgactcgacgcactgcttcgtctcttcgtaggtcaggttgtcggccttcacgaacggcgcgagatacgtgtcgaagctggagaacgcctgggcgcccgcccattcgttctgcatgatgcccaggaagttcaccatctggttgcacaggctggacagatggctggccggcttcgacgtgatcttgcccggcacgccgccgagaccctcctggatgagctgcttgagcgaccagcccgcgcagtaacccgtcagcatggacaggtcgtgcaggtggatgtcggcgttgcggtgagccttcgccacctcgtcgtcgtagatctcgctaagccagtagttcgccgtgatggcgcccgagttcgacaggatcaggccgccgacggagtacgtgaccgtggagttctccttcacgcgccagtcttccaccttgacgtactggtccacgagatccttatagtccagcagcgtggcgttggcgttgcgcaccttctcgcgctgcttgcggtacagaatgtaggacttcgccacgtcggcgtacccggccgtggacagcacctcctccacgctgtcttgcacgtcctcgacgctgatgatgccgtttttgatgcgcggctcgaaatgggcggtcacgttgagggccagaaggtcgatcgtggagggatggtactgcttctccagcgcgtcgaacgccttggagatggcgcttgagattttggctatatcgaattccgcgatctttccgtcgcgcttctggacctcgtacatgcttgctccttttgctgtggattcgcttcgtttgcgcggcgactaccaaccgttccgcgcctcgcatgcggtttcaaacaccctagcagcgtccaccgggccagtcaatgattgtaatccatatgttgaatatgcctccacaatacacaactatatatggtagattttgccatctggggttttgcgcgagcgctcgatggagctcttcgaaaagcgacctgcgggtttagaacaaagcaccgcgcgggccgttttgcagatgcccgacgccgaagctttcggcgagcggcaacgcgtttgatcgcagggcgcagcgggattatgatagacccctgcgcaaccaactagaaggagcatccgccatgacccgcttccccctgcgccgagccgagcgcgcgatgccgcgcgacgaggcgctggccgtactcgacgccgccgagttcgccatcgtgtccaccgtggacgatgacggcatgccctacggcgtgccgctctccttcgtgcggcgaggcgatacgctgtacttccacgccacaaacgagggcgggcacaagacggtcgattttcgtcgcgacgatcgcgtgtgcgcgacagcggtgacgggcgtcgaagcgttcttcgaagacggcgatttctcgaccagcttccggtcggccataacattcggccgcgtccgcgaggtcgtcgaagcgaccgagttcaaacatgcgctggtggatctctgcatgaagtacgtgccggaggcaaagcgcagcatcgggaaagcgatggagaaggaagggccgcacacgtccgtgtgggccatcgacatcgaagagataagcggcaaagcgcatccgggaccacgtggcgatgcgagcggggacgggcgcacggatgccgcggacgacggcggatgcgccggcacggatgccggcaggcagacggacccggtcgcgggcgcggaaccagtcgccgccctcggcggcgaaggagcctgagccatgcgcatcgccggcttgcagaagctcacgctgctcgatttcccgggcaagaccgcggccacggtattcacgccgggctgcaacttccgttgcccgttctgccacaacgccgacttggtgacgggcgaggcggggcgcgatggcgcggccgcggacagcagcgccctatcgatcgacgagctcttcgcgttcctcggcaaacgccaggggctgctcgacggcgtgtgcatcacaggcggtgaaccgttgctgcagtccggtatcgatgagttctgcactcgcgtgcacgagctggggttcgccgtgaagctggacacgaacggcagcttccccggccgcttgcgcgcgcttgttgaggaaggccttgtggattatgtggccacggacgtgaagaacgcgccagagcgttacgccgaaaccgtcggcgtccccgcgttcgacctcgcgccggtgcaggagtctctcgacttcctgcgttcgggcgcggtcccctacgaggtgcgcaccaccgtggtgcgcgagctgcacaccgccgacgacctgcgcgcgctggctgcgtggatcgaaggcgtacaagcgtggcacctgcaaagcttcatcgacgcggacagcgtgctgggcggcgaaggtcgcttccacgcatgggaccccgacgacctgcgggcactgctgcccgagctgcaggccgtcgtgccgggcgctcagctgcgcggggtggactagagccgcgagggtccgcgccctcgcatgccgcaagcacgcgcctcttgcggatcccgaattccggccgatcgaggaacccgcggcacacgaaccgctcaacaccccgcgaaaccaggcagcgcataggaaacgggaaattccggcaggaatcgacgcgattctgtcatcgagaaagcccgcgcccttcggcctttccgcgtccggccccctaaccagacccgatacatccaggcaaaagctctgtctcggcataaagcaacgagttcagaaagagacggcagaatcccgtcgaaaactgccaaaaatcagggttttcaccgcgcatctgcggcccccggcacggctgcttgcagctcggccaagcccttcctcagcacgcggaacgtaaccaaaccgatgacgaatgcgatggccgccgtgcccagcgccaccggcacgaggttgccgcgcagcgcgtcgaacaggccgccgtagatgagctgccccacgggttgcgcgcagttcgccagcgacatggtaagcgcgatcaccttccccaccaggtggccgggcgtctcgagctgcacgaacgagatggcttggatgctgaacatcgtggcgcacgccatggatgcgaacaggcccgctaccacgatgccgtacgccagcatcgcgtccatcggcacgcccagcaccacggcgatgggcagcaaccccaaggccgccaccagcaggaacagcggcgcgcggctgagacgcaaacgcccggcgaacacgcccaccgagacgccgcccgccaaaccgcccaacgccagcgcaccctcggcgaagcccatgtactggttcggcagacccaggatctgcgtgatcacaaccggcgcgccgatgaggatgaacgccgtcagcgtgacgttgatgcccgccaccaggaagatcaccttgaggatgaccgtgcgttcgtggcgcagaaacgcgaagctctcgacgatgtcgttcgccaccgtgcgcaccacgcccacgccgctgcgctcgatggcgtcgcgcgggatgcgcaccacggtgacgatgagcacggcagaaaccgcgaacgccgctcccgacacgaacaccaccggctcgatgccgaacaggccgaacagcaagccgcccagcaccgggcccacgaggcccgaaagcgcgctgatctggctgacgatggcggtggcgcgcacgatgccgtcgcgcgggacgatgaacggcaccgccgcctgcacggtgggctggtacacgctctgcgcggcgtacaggacgatgagcgcgcagatgcacaggccgacgaggtcgatgacgccgtcgagtgcgagaaacgccgcacacgtcgcagccagaaggatatcgagcgccgccatgatgcgccgcttgttcacgcggtcggccgcaacccctccgatgggcgtcagcacgatgtaggggatccacgcgcaagccgacaccgcgcccatgagcgccgccgagcccgtttggttcagcacgtacagcggcagggcgaagcgcagcacggcatcgccgaacaacgaagcaatctgcgcgaagatcaccgaaacgaacgatcggttgagcagggtgttcatgattgttcctttcttttacatacattcagtcggtatgtatattgggtaaaaaagaaggttgccaggcaaccagggttcgctaagacatcgcaagaggaaaccgcaagcacgcgccgtcatcccgagcggggcccttcgactcgccgcgctcgctcacaacgacagccgggaacatccgctcgctcgaccttcccttgcccgctttcgtgctgccggaatgtttcacgtgaaacattcgtacgtatttacgagctcatagcatcaagcctttcgtgaaattggctgcgatacccctcgaggatggtcgccagcccgcctacttccagggacaggccgcccagcgccttcacgatatcgaggtagtaatcgacgcgcgcacgcagctcctcggcggtggcggaacggaacatggggctgacccaaaggttcgccaacagcacgatgacctcgctgaactcgcgcggacgatcggtttggatgctgccgtcgcgcaccccctgctccacgatgggcaacacgaaatcgggtaccgtctcctggagcaccgcctggtactgcaggcccagcaaacgcgcgttcttcaccggatccacgtcgggggccgccttggcccacatgtccatctgcggcccggtgatggatgccgcgaacagcgcctgcagcttctcggcaccggtcatgcggccgtcgtcgcggatgcggcgaagctcgtcgaacagcgcttggttgtcgcggtcgagcgcagccgacaggatgtcttccttcgacttgaagtggtggtacaccgcccccttcgtcaagccgcccagcccatcgatgatgtcctgaatgctggtattgtcgtaccctttctcgaagaacaaggccaaggccacgtcgaggatgaggttcaccgtctcctcgggatgcttgttgcgggccatcggccttcctctccatcacgttacataccaacggtatgtatcctacgctcctccaatggagaaggcaagaaaaagtttgccgcacgtcctgggcagcatcatactggtgcgcatgcgtcaaagcgatcagagagaacaggagcatcgacccatgagcacctgccttgttgcacaatccggcgggcccaccgccgttatcaacgccagcctggccggcgtcatccgcgcgaaccagctgaacccgctctacgaccgcgtgctgggcggcatccacggcatcgagggcgtgctggccgaccagctgtacgacctcaccgacctttccgagcacgacctggagctgctgaggcagacgccctcgtcggcgctgggcacgtgccgctacaagctgaagcgcgacgacgaggccgatttccgccgcctcgccgacgtgatggacgcgcacgacatcgaaaccatgttctacatcggcggcaacgactccatggacaccgtggacgcgctggccgaatgggcggccgagaacgcgccgagcaagcgcttcatcggcattccgaaaaccgtggacaacgacctggtaccggtggaccactgccccggcttccccagcgcggcgaaggtggcctgccagatcacgcacgcgacgcgcctcgactacgacgcgtacacgcgccccgaggtgttcgtgctggaagtgatggggcgcgacgcgggctggctggcggcgagctgctgcatcaccggcgacgtcgatttgttggtgctgcccgaggtcgccttcgaccgcgacgcgtttctcgccgaagtgcgcgcgaagttcgaggcgaccggctcgtgctacatcgtagtgtccgagggtgcgcgctacgccgacggcacctacctgtccgccggcgatactgcgcacgacgggttcgcccacgccgtgctgggcggggcggcgcaaacggtcaagcaaatgattgtcgacacgggcatcgtgccgcgcggcgtggtgcaggatttgtcgcgcgcggcgcgctccagcaacttcgcgcagagcctcgtggacgtgaccgaggcctacgacctgggaatgagcgcccacatgcgcagcgccgaccccgccttcaccggccaggtggtgggcatccgccgcaacccggaggccgcagccgagggccgctacgaggccgagctgttcgccggtcccgcaagcgagttcgccaatttcgtcaaacgcttccccgccgagtggatcctgccgaactaccagggcattacgccggaagcggtcgcgtacttccggccgctcatcgaaggcgagccgaaactcgtcatgaagggcggcatccccgccaccatcgtgccgttcaacaagcgctgacgaagccggccctcggcgccgcccagccagcacgccgagggatcgactaacgcgtcgcgccctgctcccgattgccgttgtcgcccgaaacgtgcgttttttcgctcaaaagcgcacgtttcgggcgacaacggtttcgagttacctcccccctacacgtcccgtgtgcgcgtccagtggcgcaggtagagggcgccgatgagcgccggcatcacgggcgacgccgcctgggcgacgaagatgcccacgtagccgaagcccagcacgccgctcagcagaaacgccaggccgaagcgcacgacgaacgcgtcgatcagcgagttcgccaacacgagccgcggcgtgcccgcccccaatgcgaacgagtcgaagctgtacatggccgcgtagaacagcccgttcacgctgcacgtgatgcgaaggtacagcacggccgtatccatcgttaacggctcggtcaggccgtacgcgaccaccagcgccggcgccagcaactgcaccgcgatctgcacgcccacgatcacgctcacgttgaacgtggcgccgatgcgcgccacgtcgcgggcccggcgcagctcgcccgcgcctgcgttctgcgccgccgccgtggtgatggcctggccgatggcccagcacggcagtcccgcgatggtgctgatctgcaggccgacgccggcagcggcggccacgtcggtgccgtagcggttcagcaacccggtgaccagcgcgtacgacaggttcaccaccgccatctgcacggcagagggaacgcccacgcgcagcacctcgatcacgctcgctccaaccggcacgtcgccgctacgcgaaaacgcgccggccaggcgcccgccggggaaacgccgccgcaccacgacgagcgcgccgacggccgccacgctctgcgcgaccaccgtcgcccaggcggcgcccaccacgccgaggcccgccggtcccaccagcaccaggtcgagcgccacgttcaccagcgccgatacgcccaccagctgaagcggcgtgcgcgcgtcgccctgcgccttgaggaaggccgctgcggcgttcatgaggaacggccccgcgcagccgcagcacagcaccacggtgtagccgacggcgccttcgagcgatgccgcaggcacggcgttcgccgtgaaggctgggcgcgccaacgccacgcccagcacggcgatggccgccgaccccgccagggccaccgccaacgtggccgcgtacgcgcgccgctggccggccacgtcgcgcgcgcccacgaaccgcgcgacgaccacgccgtcgcccgccgtgaggccgatgacgaacgcgttcacgatataggcggcgttcgtcgcgttgctgatggacacgagccccaccggccccaccacctggccgaccaccaccatgtccacagcctggtacacgtactgcagcaggttcaccgccatgagcggcaacgcgaacgccagcaaccgcctgaacagcggcccttcggtaaaggaaagagaagcatctgacacgataggttcacctctgagaattcggaatgcggaaacgtaacgaagcgcccgagggcgcaaaaaaacgccgcagatgaatcatcacctgcggcgctgaacgagtccgtcatgccggcatcaaaggaaacgcgcgcccgggtttcgcgcggcgcgtctatcgatgccgatgaatatgcccctcggctccgtgcgatgcttcatcggcgatcatgcgcggagccgctactctgcaaagcttcatgtgtgccttctcgttgaggcggatacagcgtcgcccagcatactgcgcgatgccgaagcggtcaacccgccagaacctccgaagtttcgggcgacggcttccccacctcgtccagcacgtcctttccccaggcgcacatggcgttgaggacggggacgaagctgacgccgcgctgggtgagcgagtactcggttttgggcggcacctggtggtacagctcgcgatgcaccatgccgtcggcctccagctcgcgcagctgctgggtgagcatcttgggcgtggcctgcgacatgcggcgttgcagctcgccgaaacgcagcacgccggccttgctcaggtgccacaggatgagcaccttgtgcttgccgcccacgatgtcgatggttgcctcgaccgggcaatggtacgcgtcgggacaggttttcatgcgcagcctcttccgtccaatactttcttttcgggtagtatattccaaaaaagtatctacttgccccgcagaaaccgaagagtagtatggaggaagaacgaaccgtcgctcgcctcagagataggagcacccatgtcgtttctcgatctcgccaaaaagcgctgctcgacccgcgcctaccagcccgtccccgtcagccaggagcacatcgacgccatcgtcgaagcggcccgcgtcgcgccgaccgccgcgaaccgccaacctgtgcgcatcctccaggtgaccagcgaggaagggctcgccagcctggcgaaagccgcgaacgtgttcgacgcgccgctcgcattcgtcgtgtgcgccgacggcgagaaggcgtggaagcgtccgctcgacggcatgagcaccgtccatgtggacgcgtccatcctcaccgaccacatgatgctggccgccaccgacttgggcctgggaagcgtctggatctgccgcttcgaccctacggtcatccgagaggaattcgggctgccggaaactttggtcccggtgaacatcctggccgtcgggcatcccgccggcgagctgaagagccccgaccgccacgccaccgagcgcatcccgacaagcgagctggtaatccacgcgtaacgaagcgcctttcgaagagcgcaggccttctgcagcacggattttacgtcccacccaaaaggatgccattgcagagcgaacccatttgtgcagacaccgtctgcacaaattcaaaaccgtcctaccgcgcgccctccagcagggcgtgaagctcgcgctggacgctgcggtcgacgttcgtgccgatcaccttcgtggcgatctgcttgatggccgaccgagcgttgcccatggcgacgctcgttcccgccatgcgcaggatttcgtagtcgttcatagagtcgccgaacgccatcatctcgctcgcctggatgccgtgcgcgtccagcacctgctggatgcccgtcgccttgctcacgccgcgctgcatgacgtcgatccatttacggcccgacggcgcgaacacgaagtcgtcgtccagctcgcgcgtgaggatgtaggccatgtccatgacggcatcgtcgcaatacacggatgctttcaggatgctcgtctgcggcgagggcacgtcgaacacgcgcacggggttcggcaggttcttgtccacctctcgctcgaagcgcgcttcgtcgtccaacaagtagctgcgcgtctcgtcgaacagcgcaaggtgcatggtgtcgaacatatcaacgacacgggccaaccgcttcacggccgcatgcgagaacacctccaagtcgaccagctcgccggcgaccatcacctgcgcgccgttcgacgcgacgaagtccatgcagtcgaccaccggttcgaacagctcgtgcagcgtgtcgaagcgccgacccgacgatgctacgaactggatccccgcatcgcgcaaacgcataacgaggtcgtacgagccttccggcacgcactcgtttccgtcgaggaacgtgccgtccatatcgctggcgataagcttgatcatcagaaagccctccttgaaataaccgcgtgttccgatcattgtacgacgctcgcgtcaacctgcgtgaccctacacgactactttgcacgaacttgatacctgttttacaaaaccccagttcaaaatgcttcgcaccctgagcgtgcggagaaaatcccaaaacgcaacaccagattggtagagcgggcggctctgcaaccgcatgatggtaaacgcagaagcgcggccgctcagctccgcgcttcgggtatcatgcaatcgaccacgaagaagggaccgccatgagtttcgccgacaacctcgtgtacctgcgccagcattacggcatcacgcaggaagggcttgccgagcagttaagcgtgtcgcgccagaccgtcagcaaatggaaagccggcacgaactaccctgaaatggacaagctgctgcaattatgcgacctgtttcataccagcctcgacgacctcatgcgcggcagcgtgcatgtcgtcaaagaaaacgacaccgagcgctacgacgagcacatgaaccgcttcgacctgtccatcgcggccggcgtcgcctgcatcctggtcggcgtgggtctgaacgcgctgcttgaagccttcggctggccggataacctgcagaccgtcgccctgctttcctgcatcgtcatcggcgtggtaatcctggtcgtcggcagtctcaaccacagcgaattcaagcgtcgcaacccttccatcgagccgcggtactcctccgacacgctcgatcggttcgggcaacgctacccgacgctcatcgccgtcggcgtgggtctcatcctcatcgacgtcatcatgctaatcggcctcgtacccgacaacagtagctccatgatcaacggcgcatacgtggaggagctcgtcatgttccccttcatgctcatcctcgccatcgccattggcattctcatctgggcctgcatgcaaaagtcgaagtacgacctctccgagctcacctacatcgcgcatcgccgcaacctgggtgccgacatgccctctaccgccgtcgtcaagtcacccgagcagattcgcgccgaacgcgtgatgggcgtcatctgcggctgcatcatgctgctggccaccatcgtgttcctggtgtggggcttcgtgccgctgttcgaccagatcggcggctgggacggcatcgacaagttcgcgctcaaagacgccatccgccgcggcgcgggcggtttcgccatcagctggatcgccttcgtggtgggcggcatcctgtgcggcatcgtgtggatgatcggcagcgtggtgtcgaagacccaggaagactggatcgccgaagcgcgccaggaggacgcctgggtgaagtacgcgcagcaagatgatccctggtcccggggacccgaagaccccgcgtcgtcccaaacgccgaccccgtcgtccgccccgcgcgaagccaacgaccccgcgggacgcacgtggaagcactaggaaagtaccttttggacaccagcgtgtactctttgtgcctagcaccttccctctctctcgccctacgatttcgacccgtagggaaaaccgaatgcccgcacgtggcgggcgaaggaggggtacgcatgaaagattcgcgctacgacgatctgatcgaagcgaccacgaaacgaggtgccgcaaacagcgcgtccttgtttcgcaagagcgtcgtcgatcgacgcacgtttttgcagggagccgcgtttctcggcgcctgcggcggactgatgggattcggtctaaccggatgcacgccagcgaataccggcggcgcggccgcgcaagggtggaaagcaggcacttattctgccaatgtgaccggccataacgccccgttcaccgtcgacgtaacattctcggagaacgccattaccgccatcgacaccagcacgaaccaggagtcgctgggcgtcggcgcatcggctcttgaagatctgtcgaacaagatcatggaatatcagacgctgaacgtggattccgtcaccggcgccaccctatctagcatgagcctccagcaaggtgtgaaggattgcgccgagcaagcaaacgcagcgaaaaccctcgcaaaggctcccggcccggacgactccgtagaatcgtcctacaatgccgacgtatgcgttgtcggcggcggcggtgcgggcctcacagccgccatctctgccgtgcaagccggagccaacgttgtggttgtcgagaaatgcggcatcacgggcggatcgacgaacgtctccgaaggcgcgctcaacgcagtcgatccggaacgtcagcagaagcagggaatcgaagactctgtcgagcagttctacgaagtcacctatgaaggaggacacgaacagggcacgcccgaactcatacactacctgaccgacaacgcgctcgattcggttcattggctcgaatcgctcggtgtgaagttcaaggacgaaacgggatcggccaccggatcgctgggcgagcgaagccactatccagccacgccgtcgggaaacacctacatccgcgctttcgaagcgttcgcggcagaccacgctgaccaactcgtcgttttgcacgagactcaagcgaaagagctcatcctagaaaacggctccgtcgctggtctgacggccgtgcaccgcggaagccaagagatcaccgtgaacgcgaaatcgattgtcgtagccaccggcggattcggcgccaacgtcgaataccgacagcaagtcaacgacggcgtatgggccgacgtgaagctcgacgacaccatcggctgcacgaacatcaagccgtgcgcgcaaggggaaggcctcaagcttgccgagggagccggcgcggagctcatcgggctgtcggacatccagctgcatccgtgcggcacgcccggcaccggcctcatggaagacatccgcacctcaggacgcaaccgcatcttcgtcaacaagagcggggagagattcgtcaacgaaggcgccgaacgtgacaccctgtgcaaagccatcttcgcacagcctgaatcgacgtactggatcgttgtcaacaaggttcgctacccctcggagaccgagcccgacgcgaacggcgcgaccatcgagaacatgctggcgctcggccatatcgtgaaaggcgaaaccgttgaagacttggcagagcagacgcagatggacgccacgaagctgcaagcatccatcgacggttacaaccaggtcgttgccggcgcaaccgaggatcctttcggcttcaaagcaaacaataccgccgaccggcagttgaccgagggaccgtggtatgcatgccgcaaggtaccgacggttcatcacaccatgggcggcatccgcatcaacgtcaacacggaggccgtgagcgcggatggcgaagtcgttcccggtctttacgcttgcggcgaatgcaccggcggcattcacggaagcaaccgtttgggcggtaacgccattgccgactgcatcacgttcggacgccaagccggtacgcaggcggcacagcacgcgacaagctaagcctacccctccccgacgcaccttccttacgccctggccgtatattccttctgcggtcagggcgatcttttgctgatattattctcgcgcgtcggcaactttgtcgagcagctcttgcttggaatgcaccccgactttacggtacaccgtcctcgtataattccggatggtgttttccgagtaattaagcgtttgagcgatgaaggatcgacttcgaccttgggaaataagcgacacgatatccctctcgacgtcgctcaagccgtacaaccctgcgaatgccgcaacaggatcgacgaccccgacctcggcggccccttcggacgcttcgtttcgcatagtcccaagctcgaagccgattgggtaatcgcccatgaaacgcggcctcataatgagcgtcgcttcgaccagcaccacgatcgccatcacgatgagcagccacaaactatgatcgagcgtcgggcctaccgcgtacacaataatgcgtccaacggccatgcacagaagcgaaccgccgtaaaccaccgcgtataccaacgtcgtttgatagtggacgtggcggccgatgagacaaatgaagaacacgagggggatatagaagcacgtcaccgcattggtcagaagaaacgtgctggcttcttcggatccgctcgatccgctcatcaaaaagcatatgctggccatcatgagcgcattctgaaacagccagtatccggacaacttgaacgaacgtccccgcaccagcacgagccacacgacgaacgcgatcagcagcaccacgagcacctgatgaatcgaacgaaccgtttgcgacaattctcgatgacgtccatcggggtatccaagcgccatgcccagcagcagcgcgtacaggaagaacgcgatcagcgcatgcacggctcctgtacgaaacggatccgattcgtacagcgcatcgacccccggagccttccccatgccgtcttcccgacccgcccgcgtcgttttggcgcgctcgtcaaggcgcgtcatcgcctgccagtacgcgaacaccgacagggcgggaatgaacaggttgatcatgcccgaaacgacaggatccaaataccccatgacgagcgagagcgcgcatgaaagagccaagccgccggcagcgtagaagaatacttcgccaggacgaagccgttcgagaaagaaaatccagatgatctcgccgccgaccagacctattcctccgacgatgacgcgtagcgcctcgaatcgggtcgcgtcgaaaaagagatcgagcaagtaaagcaagctggaaaccgtcataagcacgaagccggaccatacgaacacaccgcgcgtcgcacgcgtgaaaccggccttgtacactagcaaaaccagcagcgcgatcaccaccacccgagcgacgttcgcacccaccgtcaccatgcccacgtcggcggaaaaatgcaggttgtagaagttgaactggtaccagagccggtagaagcctatgccgaaaaaagcaagaaccaaaccggataggaatgtcgatctgaacgcctcgaaagaaccagtatgaagataccggtcaaccgcccgggcgcgctcaccacttccgttttcctccccttgcttcatggcggaattgtaccatagccgattccgcacgcagcagaggcgatggagcccgaaagcaccgtgtccatcccaatcgcccgcttgcacgaagctcttcccacccataaacgaggcgctcacgcaagcagcgcaggaacccgtatcagtggccttgctgaaaaccattcatcgggcactgcttgccgacacgaggctctcgggaaacgcacgcctgcgctcggcgcactggccgatgccatggcaggtcggcctattttcactgcggcgagcatggctcgcgccatcggaagatcaatgccgacggcaaacacagtcatcgagcgatttgcagaagccggcatcgtcagacaaatcaacatcggcaagcgcaatcgggcgttcgaggcccaaggcatcatcgaggccttcatcggcttcgaacgcgcggccgcatcaccagccaacgacacgctcgtcagcaaacccgtccgtccggttccgttcaaagaggtacggtagctactcccccagcttctcggcggcttccatccattcttcctcaagggcatcgatctgctgttggagatcggaaatctgggcttggaagtcgccgagcgcggtgaagtcggtggggtcggcggcggccatgctcgcgcgcacgtcctcgatcttgccgttgagcgtttccaccttgcgctcgttggattgcatgagcttgcgcagggtacgctgctcgccgccggagaggcgggagctttcgggcgatgcttcggtcccagataagcccgaatcggcggcgtgcgcagggcgttgacgtgcgggactgccggccgccatggaagagggggaggcgtcggacaacctcaaatactcgtccaccccacccggcagatgacggatcttcccgttcaccagggcgaactggtggtcggtgacgcgctccatgaggtagcggtcgtgcgtgaccagaagcagcgtgcccggccaggcgtccaacaggtcctccaccacggccagcatgtcggtgtccaggtcgttgccgggctcgtcgaggatcagcacgttcggctcgtccagcaggatcaacatgagggccagacggcgcttctgcccgccggacaagtccttcaccggctcgttgaggtcggcgcgcttgaagcccagcttctccagcagctgggcgggcgtcatctccttgccgtccagcatcgtgcgacggctgtagcggccgatgacctggcgcacacggtcgtcgcccagttcggacagatcgtccagatgctgcgacagcacggcgaaacgcacggtcttgccgatcttcacctcgccggcgttcgggcgctgcagaccctggatcacgcgcagcagcgtggtcttgcccgtgccgttctcgccgacgatgccgtagcggtcgcccgggccgatgatccagtccacgtcgtcgaggatcgtcttgtcgtcgaagcgcacgctcacgtgctcgagatcgaccacctgcttgcccaggcgcgccatggccatgcgcttgagctccagctcgtcgcgcaaaggcggcacgtcggcgatgagttcctgggcggcggccacgtggaacttcggcttcgtcgcacgcgcccgtgcgccgcgcgagagccacgccagctcgcggcgcagctcgttctggcgtttctgctcggctagcgcggccacgcgatcgcgctccacgcgctgcatgatgtaggccgagaatccgccctcgaacggctccacccgtttatcgtgcacctcccacatacgcaggcacacctcgtcgaggaaccaacggtcgtgcgtgaccaccaacagcgcgcccgcgccctttttccagcgggttttcagatggtccgccagccacgtgatagcgcgcacatccagatggttcgtgggctcgtccagcgccagcacgtcccagtcgccgatgagcagccgcacgaggtccactcgacggcgctgcccgcccgacagcgttcccacctgcgcgtcccaagggatatcgccggccaacccggcaatgatgtcgcggatgcgcgcgtcgccggcccactcgtattcaggcagatcgcccaccacggcttgccccaccgtggcagcgggatcgagcgagtcggcctgtcccagcacgcccacgcgcacggcgccgttgcgcagcacgcggccttcgtctggctccagcgtgcctgccaacaggttcagcagcgtcgacttgccgtcgccgttgcgcccgacgatgcccacccggtcgccctcgtcaacgcccagcgacacctcggagaacacctctttcgtggggaaatcgacccgcaccttttcgcatccaagcagaaacgccatcgcccgccatccttcttcacgtagttcggaaggccgattatagcgcatggcgggaaagcgagccgccgatccacgagaaggccgccctcatcttgcgcctcatgcccatacgaaacctcgtctcgaatcccgaccccaagcaggaagaccgactcgcaacgccccgccagctagcgattgcgttacaatggggtcaagccctgatcatcatgcaaaaggaggcgccgcgtggaactccttgaattctcgctgctcatgctggccgccgtgctgctctcatccgtcatcgaccagctggttcccaaagtgtcatcgcccctcatccagatagggctgggcctgctcatcgcgctggtcatgggcacgcagatcagcatcgccttcgatcccaacctgttcctagtgctgttcatagccccgcttctgtacgacgaggccaaaaacctcgacaagaaggcgctgtgggagaacaaacgcccggtgctgtcgctggccgtcgggctggtcatcgcctcggccctgatcatcgggttcgccgtcaactggctggttccatccatccccttggccgcggcgttcgccttgggcgccgcgctcggacccaccgacgcggtgtcggtcgcctcgctgtcgaagcaggtgaagatccccgcacgttcgcgcaatatcttggaaagcgaatccatcatcaacgacgcctcgggcatcgtgtcgttccaattcgccatagccgcagccgtcaccggtacattctcgctggtcggcgccacggcgaacttcttcttcgcattcctcggcggcgtactcgtgggcgtagcgttggggctcacgggcaacttcatcgtgcgccgcgtgcgctcgtggggcctcgagaacaccacgttccatgtgctgttcgaggtgttcgtgccgttcatcgtgtacctggtggccaacgcgctgggcaccagcggtatcatcgcagtcgtcgccgccggcattttgaacgtcgtatcgccgcgcgccatcggcccgtccgtctcgcgcatgaatatcgtgtccgccagcgtgtggcgcgtgctgacgttcgccctcaacggcatcgtattcgtgcttctgggtactcagctgccgcgcgccatgcagcgtacctgggaaaacgtcaccatcgataacgacgttctcatcggctacatcctgggcatcaccgtgctcatgctggccgcccgcttcctttgggtgcttatcatggaacgcgtccatcgccagcgcagaggccggatgacgttggacgagcttcgctcgacggccatcatgaccttggccggcccgaagggaaccatcacgcttgccgtggcgttcactattcctttctccatcccgcagcgcgagctgctgctgttcctagcatgcggcgtcatcgtggtcaccatgctgttggccacgtttgccgtgccgctgatcgcgccgaagaaagataccgacgacgaggattgcttcgacgaggagcaagccaatatcgagatactccgatcggtcatcgaagagctggcggcacgtcaaaccggcgagaaccgcgcggccacgcaagcggtcgtccacggctacaacgagcgcatagcccgcctgaagaacagaagcgaactgcccgacgagtccatggcgcccttgcgcctgaaagcgaaccggtgggaacgcgatttcacgctcgacctccttgaacgcgaggaagtggatcagctgatagggtaccggcacatcaagcgcctctcgcgcacggaaaatctgctgcgccatcatgccgaccgcgtgtcgctgcaaatcgcctacctgcgcgtgcgcacgctcgctcacgcaggatggcatcgtatcgtggaggcgctgcccggcgacgatctctccgagcgcgtgcaggccgagcgcgacctgcgcctccgcagcaacgagcacgtcatcgaaaagttgcaggcggagctcgcctctcccacttcggaagagcctaccgagaacctgagcaagctgctactggaataccaaagcctcgtgcaaaccattcacagcgccgcaagcccgtccatcaccgtgctgaccagcactgcgaacaaagccgtggacatccagcgccaaggactgcggcttgagctggaagccattcaggcgcgctacgaggagggggcgctgccccgctcctcgtacaaacggctgcgcgagaacgtgatgctcatgcaaatcgatctggaggacaacgtgtagaacaagacaaaaggacggagtcaatgtctcattttcagggggacttcgcctcggctgcccagcttgcgcatgcaacccgcgcacgtagcacgcgcctcgcctagaacagaagcatcaccgcgaccacgaaagcagccgtcaccacgaaaccgcctgcgacgatggcccacacagcagggcgcgcccagttcagcgtccaaccgacgccgaaacgctcgggcaggaacaggctggcatcgtcggggttgcagtagaacacgccgaacttccaataacggtcgtcgtccacatgcagccgatcggatgtctgcatgttcttgaacacgcgcgaacccgcctggccgtacacgaggctgatggccatggcgccgacgcacagcacgatagccgcgatcatgatgaagacggctgcctgacccaggtcgatcacgttcatgaacgacagcggcatggcgatcatggccaccgctatcaccacgcctcccgccaccagatagatgctctgcgcgcgggcgaacaggccgtaggccagcgccgacgtggccggcgcgccgggttcggcccacttcttcgaacgagcgatggtccagtgggagaacacgaaacacgcggccatgaacccctggatgagtaccggcatccacaggatgagcggggttttctcagcccaatcgttcacggtgccgtcgaagcccatatgcatgggaatcatgtcgggcatatgcacgtaacccaccgcgcccacggcgaaggtgatggccatgatgggcaggtacaacaggttccatttgagagagatggctcgcggcacgggctgctcgcccaccaccgcgacagactcctgcgcgtcagccgtccaaccgcgcttggctttgtatgcggacatcttggcgcggaacgccagcatgagcgcgtagccgcctgcggtcaccgccagcgacccgacgatcagcgcgcccagcacgccgcctgcgttgcccatggcggcgctcgcgaagccgatgaccgtgaacaccgccgtagccgacccgacgatggcggcgtagcggcgcttgagtcctacgacgtacggatcgtgctgctcggaggtgggaacggtgaccgtgaacacctcgccgcggcgcatgaggtacggggtgatggccatgaacgcgccgatgaccggcatgagcaatgccgtaacggccattatgacggtcgggtcgaacccttccactacagcgcaccccctttgaacgccggttcgcacgaggcggcgcgctcgatgttctcgccctgcgcgtcgcggctcgcttgcgcagttcgggcatcggatcgttcgcccgccccgtaggcgcgcgcggcctggcgctgcgcgcactccaggaactcgccccacgtgccgccgcgcgcccggtgcgccaacgccagctcgaacaggccgtcctccatcttcgccagctcgatttgggcgcggtcggcccgatcgtcctcgcacgggtcggcgatgtaggcgcccgatcggccgcgcatcagcacgtagccctcgtcgcgcagcacggcgtacgccttgttcaccgtgtgcaggttgatgcccaagtcgctagccagcgcgcgaacggatggcaacgccgtgccgggcaccagctcgcccgtggcgatggccgcgatgatctggctgcgtatctgcaggtacagcggttcttccgacttctgatcgatgcgaataaccatacgcacgccttctccctttcgtttcctcgtcgtattgtagcgcgcgcaaccgagaggcggcgatcgcgcaggcgattatcgtctcgcacattcgtcctccgcgccgccttgagcgactacgccctcagcccccgcttcaccgcgccgcggtacgccgcgacggagaccgcggccgccagaagcgccagcacgagcgacgcgcccacgcctagcaacgtcgtgacgcccatgccgaggacgcagaacaccatgccgatcatgatcacggcgaacaccggaacgccgcgcttcaccggctcgtacacgctggtccagtcgtacttcgggctgcgcgcgtcaagcgccagtcccagacatgccgccagcatgctggccgcaagcggcaccgcgaacagcgctgcgacagacagggcgtccagcggcagcgacaccgccatgagcacggccgacaccgcgaggcactgcacggcgatggccaagttgacggccaccttcgctcccagcaccgtcgccggcgacacgggagccgtcagcatgagccaacgcgccgagccctcgagcgaaaccgacgcggccgtcgtggacgagatagcgcagaagaacgcgagcgcccacggaagcagcgcgccgacgaacggcgcgtacgcgggcggcagcaaatcgagcgacagcatccccgtggcagagcccaccgccaccgcgacggctgcaaccagcaccagcacgtagcctatgcacgcgttcatgaagtagatgggcgtggcggctaaaagccgcagctccttcaccatgagcgcgcggaagggcgtggacgacttcgcacccgcgcccttatcgccgtcgaacgagaacgtcccgcgcggcctggacgacatgagcagcgagttcaccggcacgaataggcgcacgaccagcgcaaacactgccgccgcagccgcgatgttgaccgcagcgaaggcggcgaactgcacgaggtcgccctgcacgatgcctgcagtcgcccatgcggccggcgggaagatggccgcgagctgccccgtcagctgggcgccgagcgcactcaacgccgccaggtcgtcggattggccggacagcgcgaacgagccgaacaccgccgccagcgtggcggccagcgtcagcacgatgaccgcgacgttcgcgtgcttgaagcgcgaggacaccgcagcgatcagcaccgccagcacgacggccgcggccaggggcagaagcggcgccagcacgatggacagcgccatgcacgcgaccccgaccgccgacaccccggcagccgacgcgtacacggcgaaagccggcaccatcaccagcacgccgaacagcaggctcatggcgtacagcgatgcgatacgcgacaacaccaccgacgacgtgggcacgggaagcgacatcaccaggtcgtagtccttgaagccgaacagcacgccgttcgttttgaggaacgccgcaaccgcgccggcgatcgcgcccaccagcaccgcgaccaggggaacggcttcggccaagccgatttggacgagcccctgcgccacgcccgccgagtacgccgaagcgaacagcaccacggccgccacgaccagcgccgcaagcgccagcgtgcgcttcgccttcgcggggtcggcgtgcagcgtcttgttgatgccgaacagccctagcagctgtatcttcagcagcagaatgaacggtttcatggcaaaccccctacgcgttccggtcgatcatgtcgaggaacacgtcctccaggctctcgtcgcccaccacgtcggccgtcgggccgcatgcgcgcagcgtgccctgcttgatgatggccaccttgttgcacagcttctccaccacttccagcacgtggctggagaagaacacggccgagccgccatcggccagctcgcgcagcatctccttcacgtggaaggacgcctcggggtcgagaccgacgaacggctcgtccagcaccagcagtgtcggttggtgcacgagcgcgccgatgagcaccagcttctggcgcatgccgtgcgagtacgaggagatgaggtcgcccagcgccgaggtgaggctcagccggtccgcgtacgcccggatgcggcgttcacgcacgtcggcgggcacctcgaagatgtccgaaaggtagttgagatactgaatgcccgtgaggaactcgtagatgtcggggttgtcgggcacgtaggcggtcatgcgcttgcaggccagcgcgtcggttttcaccgactgacctgcgatgcggatgtcgccctcgtcgaagcccgtcacgcccacgatagcgcggatgagcgtggttttgccggcgccgttgtggccgacgaatccgaaaatgtcgcccggcatgacgtcgagcgtcacatcgtccaccgcccgtttcgcgccgaacgccttcaccacatggttgaccgaaagcaccggagcggccttcttctgttctgccgtcatgcgcgtttccttccctatccgcgatccgttcgcggttgttgaccttcccgcggttgtttgttatatttatgctataacagatggaacaaagatgcaaggggcgtttgccggaaagcagcgaggcgaacgaatctgcgagtcgatgtttcacgtgaaacattcgttcgttgcatcagtcgaagaaagggagtcgccatgatgcgaatcgttgtcttcctagcagtcacgttcgggttgacgtgggcgtacgagttcggggtggtctaccccgtctcgaccggggccttgacggacataccgcccatcgctgcgcagctcgtcacgggggcagccatgttcttccccgccatcggcgtgctcatcacgcgcctcgtcacacgcgaaggcttcaaaaacagcgtcatcaagcccaagcggttcaggaagtccgctccctggttcgccgtggcctggctcgggcccgcgatcctgatggccatcggcgccgctgcgtacttcgtcgcgtttccgcaggacttcgatcccggcatgtccacgatcgtcgccacgcagcagcaagcggcagcggcggcgggcgtcgaaggcatccccgtcgaccagctgcgaacgatgatgatcgtccagctgttctccgccgtgctgatagctcccgtgctcaacatcttcaccacgttcggcgaagaatggggatggcgcggctacctggtgctgaagatggccacgcgcatgcgcatcgtgcccacgctgctggtcaccggcgtgatctggggcctttggcacgcgccgctcaccatcatcgggcacaattacggcgtagggtacccgggttggccgttcgccggcatcgccgccatgtgcgtgttctgcatcgtgctgggcatcttcctcacgtacgtcaccgtgcgcacgggcagctgtctggcggcagccgtaggccatggcgctatcaacggtttcgtcagcgcgggaatcatgttctcggtcacaggcggcaacccgttcgtgggacccatgcccgtcggcatcctcggcggcagcgcgttcatcgtggcggccgctttcatgctgtgggacctgcaccgtcgcgagaaggccggcacgctcgacatgccgcaagcgggcctgcccgacgacacgacgaaagccgacctcgcccgcacgaccgccgcgagcccgcctgcccctactgcttgatcaccgggcaggcgacggcgctaacggcggacaacgccgcgcacaggtagagggcggacggcgccgaggccgatgcgtcgacgagcgcgcccgccgacccaagaaagcgaaccggaacccaaacccccttgctcagcatcgaacgggataacaagaacggatgtttcacgtgaaacatcccgccgcacttggtgcggtcgccgcgcaccaagaagaagtgagggcggggtcgagctcgcgctttgctcttcgaacgctacggccggcgccctcctcccctgcgcctgcgcgggatccgcggacgcaaagggcgtcggcgcagtacgcacccattcatctgcgcaagcacagcctcgcatcatttcgcgtcgcgaggctcgaaccgatttcaaggacccctctgcaactttttcgacttcgtggcaggcttcagggtcgaaaacgatcttccggatgatcgatcgactgcaaccaatcgagaagctcttggaaaacccctggtcggcgctttcggcggcttcctcaacctgccacgaagtcgaaaaagttgcagagaagctcgatttttctactcgagctgcacgagcgggaggctggcagaaggacccctgccatccgagtacgcttcacatgaaacaccccgccgtcgttgcaggcggcacgcggcgtaggagggacgccccgaaacggaacgcccctcctcaagatcgccgcgctatacggtgatcttgcccttgcccgtacgctcgacctcgcacaagccggatcggaagggagggaatccggtgatggggtcgaagtcgcgcgtggtcagcaagttgatatcggcctggtgccaaccgtggaagacgtccacgacaccgggcagcacgaggttcgtgatctcggctttcatcgtcacttcaccgaactggttgaacacgcgcacctgcgcgccgtccgtgatgccgcgcgcctcggcgtcgtcggggtgcaggcgcaccaccgggtcgggcatgaactggttgagccacggcagatcgcgcagcttcgagtgggtgtagtacggcacgcgcgagccgctgttcagcaccagcgagtagtccttcgcctcgtcgggcgtgctcaccgggctatgcaccggctcctcgtacaccggcagcccctcgaagccgtactgcttcagaatctcgctcaccagctcgatcttgcccgtcggcgtgttgaagccgggctggccgtccttgcgcaggccgccggtctcgtacttcttctcgtccttcgagccgcccggcacctcgtaaccctcgggatgctcccgcagcagctccagcgagatgtcgatgcccgcaccccggtacatatcgtcgagcgccgcctccacgctgccgccgtagcactcctcctcgaagcccagcgcgcagccgatctccaggatgatctgccaatcctcgcggcactggcccatcggcttcaccaccgggtcgcgatggaagatcttgcggccgaagatggctggcggggccatgcgctcgtagcacatggcggccggcagcagcatgtccaccaggtcgtgcgtccaaagacgcatatagtagtcgatggccacggtgaactccatgtccttaatggccctctggtactcaggcgtctgcggccacatcatggagttcacgcccagcagcacgccggcgcggatcttgccgtcggccaccagctcgggcaggtgcgcggtctggatcatcttgaaatagtgcgcccacaccgggaagtcatccttgtcgtagcggatatcctgcaggcccttctcggcgtacatgtcctcgagtcgaaacgccgcagtggacgccgagtaatcgaacggcagccccggccccatggccaggccgcccgccacgtccaaatcgcccgtcagcgcgatgatcgagtacaccgcgcgctggaagttgcccacgttggtggcgtggcacgcgccggccgagctggacaccagcgtcgcgggcgcgttctcgcagatgatgcgcacggcctcctcgagcttcgcagcgggaacccaggtgatctcctccacgcgctcgggcgtgaactcctgcacgtaaccggacagctcgtcgaagccgtgcgtccacttctccacgaagtccttgtcgtacagaccgtcgcgcagcatgacgtggatgaacccgagcgcaagcgcgccgtcggtgccggggcgcagctgcagatgcacgtcggccaagccggtcaccgtgggcgtgatgcgcgggtcgacgacgacgaacttgcagccgcgctccttctgcttcatcatgtcgccgaaacggtagggctgcgaccatgccgggttgagcgaccacaccaggcagctggccgtggcgtcggtaggatcggaacccatggtcagctggccagtcaccagctgcgagcagatccacgtggccgccgcgcaggtggagctttccgtgccgtacgtgggcgagccgaacagcgtggccaggcgctgcatagcgccgcgcggctccttcggatcgccgcagtagaacagcaccgcttcgggaccgctctcttctttgatgcggttgagctcgctggcgatgcgcgcgtacgcgtcgtcccaggagatgggctcccattcgggcgcacccgtgcccttcgggttcgtgcgcaccatgggatacgtgatgcgatgcggatcgtacaactcctgcaagctggaaatgcccttcgcgcaaatggggtcggccgggtacttgtcgcgcgcctccacgcgcaccaccttgccgtccttcaccgacgcggcgatgccgcacttcggcacgtggttgcacatgtcgcagtacgtatacttcacctcgacgggcgcctcctcggcgatggcgccctcgggatgcacgatctcgaaggcccctccggccagcgcggcgcctgccatcgccgccgtgcccttgagcagcgtgcggcgcgaaatgttgacggactcgttcatgttagaccccaacctttccctgcttggacgatgccggcgcgttggacggcagcgcgtccaacggcataccgtccatcggacggtagtagaacgacgtctcgtccacgcgcagcaccgcctcgtcgccggcgatgaacttcgacaccgggctctccgggtcgtccaggtcgccgaagtagcgcgcacggcccgggcagttcacgacgcatgccggctgcttgccctcggccagccgggcctcgcagaagatgcacttctcggccaccagctcgcgctgcacgccgtaggactcgtagggcgcgggcacgtcggcgccgaacatgttctcgctcgtgcggttgagcttgcgcgcgccgtacgggcacgccgccaggcacagcccgcacgcgatgcacttctcgtagtcgatgacggtgatgccgtcgtcgcgccgcacgctggctcccgtggggcaggcgtccacgcacgcgggcttctcgcactgcacgcacgcgttcggcacgtacgcccggccgctctcccctgcctgcgtgccccattcgtacacgtccaggttgttccacgacacccccggccgttggttgttctgcatctggcacgccaccacgcacgcgccgcatcctgcgcatcggcgcaggtcgatggccattccgtaccttgtcatcccctcgtcctttctccctggcgcggccgtttcggctcgcgcatctcctggtgcgaactctacgcgggaccgagggcctcttccagaagcgcccgcaacaaccgatttccgtatttcgccctcccgcgcggctggcggcggcatcatcggtttctggcgtgcgccaggtttcacgctgctgcgcgtcgaacgtgcagcgcgcagccttcgcggcatgtcgcggcgttggcggcaaacccccacaagtgatagtattgtcctggggattcaccatgcagcgcggctggccgagccgcagggagagggaaccatggcaaccgagcaagagtatcgatccatcctgataccgaaccagccgttccgacggctgaagatcgccgactacatttcgcaggggaagaagaaaaagctcttcaagggcgagtacatccgcacgagcgccaagaccatcgacgacttgtactattactacatcgacgaaggccagatcgtggccacgttcgagcaggaatcgggcgaggtggcgccgctgtactggcgcaacgcgggcaacgccttctccgccgagtacaacgactacgcgtccatcggccgctacaaagcgcgcttcatcgccgcgcagaacaccgtgctgttcgcgttcacgcagcgccagctctacgagctgagccaggacgaccccgagctgttctacgagttcatcaacgtgtgccacatgtcgttcgcgcagatgggacaccgcatcagcaacacgggctaccaatcgtcgacgaagcgcatgatcatgtggctgcagaagctgtgcgccacgcaggaatgcgacgagcacggcgtgtacgacatcgagtgcaagctgacgctgcaacagctgtccgagctgctgtccatccacattaccacctgcacgaagatcgtggcgacgctgaagaacgagggcgtcatcgagcgcacgcgcacgcgcatccgcatcttcgacgcccagcgcctcgcccaatacggcctcgaggacaccccgctggcgtactgatcgcccctatggcgcgaagtcgcgcttgcgatctgaaggagcgcgttccgcgccgattcgtgacggacgcggcgcgcgaacgacatggcgaaagccgacctcgtttagcgagacaacgcatcatcgcccgtaaaacacggttttcgcacctgagacgtgtttttcgggcgatgatgggccgcgcacggctccgctcgctgcgctcgcgcatgtttcgcagctagcgtaccttcgccacgatgaagcccagggtggccacggccatgacggcggagaagccgaaggccagctggtaggccagcgcggggttcgcgagccccgccgcagacgcgcccgccaccgcgatgaggaacaccatgaccgacgtgcccagcgatgcgcacgcttggcgagccgagatgcagaacgacgagccgtcggccacgatgggacgcagcagctgcgcgaggctccacgatgtcagcggccccaccagccccgacacgcccaccgcgcgcaacgcctggcataacgtggtcacgtacagcggcgtgtccgcatcgagaaacgacatgagcaccgcgcccgtcgccagaaacgcgcccgacaccagcgcgacgggacgcacgcccaccctgtcggtgagcacgcccgccagcgggttcagcacgagcgcggccacggtgccgggcagcagcaccactccggcttcgagcgcggttccgccgcacagcccttccacgtacagcggcacgatcagcgtcacgcccatgaaggaggcgttcagcaggttctgcgcgatgaagcccgcgcgatactgacgcgatgagaagatatccatgctgatcagcggatcgtccacccgcttctgccgccgcacgaacagcacgaggaacagcgcgcccagagcgagcggcacccagatgaacgggctttcgaacgagaagctgctcgcgttcgagaacgccagcagcagcccgccgaacccgagcgtcgactgcgcgagcgacaccacgtcgagtcgtgcgctcttgtcgggagccccagatggtttgatggcgacggccgccgcagcggcaagcgccaacatgatgaccacgagcagcacgaagaagctgcgccatcccagcgagaagctcatcgccccgccgatggtgggaccgatgttcggcgcgaagcccatcgcgatgcctgccacgcccatggccgtggcctgacgaccgcgcgggaagcgcgtcatggcgatggtctgcatgaggggcatgagcatgcccgtggagatagcctggaacacgcggcccgccagcagcacgccgaagttgggagcgaacaggtcggccagcgcccccaccaggaagaacgcaagcgcgatgaacacgtgctggcgcaccgagaagcgtcgcgagaggaacgtggccaccggaacggtgatgcccagcaccagcatgtagctggtagtcagccattgtcccaagtccaccgtcaggccgaactgcagcatgatgtcgcccagcatggcgttgaccgcagtctgcgagaggttccccgacgccgacgccagcacgacgatggcgaacagcgcgtacacgcccatccgctcgctcttcactcgtttcatgcccgcatgtcgcctaccctccgtttcccaccagcgcattccagtatatcccaaatatgcgcgaacgcaggaggagcctctcgcgcttcgcgatgcaaaatcgctaaagcgcacgaggctcctccttggacgggtcgcttgaaagacatgcgtgcggccatcggatcatcttagcgaacaacccgaaagcaatcgactccggaaacgcctatcgctacgaacgagcgagtgcgcttctagccgatatcctcccgaacgcaccgcactcccccacgtttccacctccttggtacagatggccccaaatcgagccgaactcaccggcagaatacaatcccggaatagcctgcccgaacgggtcgagaatctcgcccttttcgttgcgaaccggaccgccatcggtattgagcagtgcagggacgcaaagcatcgcgtagtaaggaggctggttcaaaccggtgagcgtgtcagaaggacggtagaaagcgagatcctctcccttgtccacaaactcgttccattgcttgaccgttttcagcagctcgtcttcgggaacttcgataaccttggcaagctcctcgagagtgtccgctgaaaccgcccatccgtcaccgacgggatcggtcgaagtctcttccggacacgcacccgcgtcaagacccgcctgatcgaatacgaaccaacccttttccggcaagggaaggtgcgccatatctccaccgaactgcgtgatgccgtgtcggtagccgacgttgcgagttatgtcggtatcgggcagcgcatattttttgaaattgctgcatgcgtcgaagtcctggtagaaccttcgtccgttcacgccgacggtgatgccgtgctgcttcaccgtaaacgagtacaacgtcgaaacgaaccgggtgttctctatgttgcgcaaagagagccagtattgggcgcctccgtgcatatgccagaagtcggcacccgctttcatgcagatacgatgcccgtcgccagtgttcgccttgcctgcatacggatagcctttgacgcccgtatagtcgcgaagcatatccgggtcgctttcgaagccccccgtgcacatgatgacgcctcgcttcgcacggtacgatttgccgcccgccacaacgcccgtcacttcgcccgttgaggcatcgcgaacaagcgactccaaaggcgtggaagccttgtactctatcgtgtcgttgcgcttcttcatttcggaaaacaagaactcatggatatgatggggctgatcgccctccgttttgaagagaaggaagcccaccgtgttgtcgtcggggtactcggcgtattcgttcgtctcctcccccgatgggtcgggttcgtagatgttcagccactcttccttagcccccaaacccaaaatccagttcaggttttccttcgattcttccacgaacgccctgatggttgcttccggagtgctttcccctataaggtgtcccaagtagttcatcgggccgtcggtttcgtcgaaatacagctgccaacccgcgcagaacgggctgttcccgttcggaagcgagtccttttccacgacaagacaggaagccccgtcaccctcgtccgccaccgttatcgcagcagtaagccccgcaatgccggcacccgccactatgacgtcgtactctccgtcccatttctcattggaagaagccgaatcggcttccccgctggcgcaccccgcaagaccgaaagcggtagccccggccaaagccagacctgcccccttcaagaaattgcggcgcgttgtcttggttccctgctgattctcattcgtcatcgcgcattccccctccatatctcatccctttctgcatcgatcgctagcctgccgaagccagcgcctcgacagacggcaaggctcgcttccgcaacctgccgcttccacttttacccttcctcccgagcccgttcatccgacaaactgtccgaacgaggttgaaacgcatccccgaaccggatgattttcgtcccggacgcactatgcgagacaatatcgctatctgcgcgcttaccgcgagaacctcgatgttctatagtggatcgaaccagaaactgcaccgtctcgaaccaggcacgaccaagaagagcggcacgcgttttcgcgcgctagcgtaaggcctgaatcggacgcgacgcgataaacggtcaacggttggtcgttcgaatgaaatcaggcttccaaatctctctggaatgcagaaaggcgcccatgaagaacgtcacgccctattcgctcgatgacgaagctgttcgttcggatgcagccgtctccgtcatatcttcgatcggattgactgccgtgatagtatgggccgacctcttggggcacggattcggattcgcaccgtcttcgtcgattattcaacagctgggaaatgcccgtcttttctttctcgtaggattcaccctctgcgccataggatccgtgcttttagcgagagctccacaaagaaaaacgcaggtgctgacaaaggcggctccgacagccgctttccttggaacaggactatacggcttcgcctacctgcaaacggcgctaccgtcggagatcatcgcgcttctgggactcgtctgctgcggcgccggatactacgcgacgactttgctcatatattgcgaactcgcaaaaacgaaacgcctcgtcatggcaataggagccttatcagcgagcttgattctcaaaacgatcgtcggctcggagttaagcacggctctgacctcgtcggcacaagtggtttttgcttcgattctgccttgggtctccttcgcgtgcctggaggcgctcaagcgcttcggcacatcacgctatctcgaagcataccgctctcgcccacttttgacgaaaaaaggtatgtacgacctcgtgtttctgctagtagccgtatcgttgatactggcggctctgagaggcaccagccatcttggactctggggaagcaaccatttgggatcgcccgtctcaactccggcaggctacctcacagtcgccctcgctttgactgcttgcgcatacctcaccctgcttcgcaacagcaataatcagatgcttgttcgataccagcctgcgttccttgtcctagccggaggctttctcatctacgttcttcagaatgagtacgttttcgcacggatcgcagatcccgtgttcgactggctctacctgaccgtagagttgttcgggcacctgctctcgggaaccatgatcatcaccgccatccgctcggcatcggcgccggcctggctgttccaaggaataagcgattcagctttcggcttagtcgctgtaccatggctgctcctcgttcaggaagctcatgtcgatatcagaatcctgatggccgtagccatcttcctcgtgatggtagccgccatacgtcccatgagcacgcgccccatggaaatcgagcgctcgctctctttgtcatcttgcgaaggcgcagcggagcttcaaggcgatcgttcgacaagcgcaagcgagccaacagagcgcaacgaaccctcgatagagcaacgcgtcagcgaaaccctgacgaaataccatctggaaatcgcgaagcggcacaatctttcctcccgcgaaagcgaggtattcctccttttggctcaaggcagaagccgtccttatatttgcgaggtattctgcttgtccgatggcaccgtcaaaacgcatatcacgcatatctaccgcaaattcgatgtccacaatcgacaagctttcatcgaccaagttcagaaagagatcgcggagctcgacatgcgcaatggacaccaaagcgcatagcgccaaaactcaaacgagcagcaggcacggacgccaaacgctgtccccgaattggcagccatgacaaaattagcttcggcgaactcgcgttgggatcttcacgacctggccttatgtcgtgcatccgccctggcattcagtccaacccgtccaaaatcgcctccaaaattgccacagcttgccatttggggacagccaacgaggacgtcctccgacgcaattacgccgctgctttggcgcgcgtcgacatccttgcccccattgcatgataatgccagttcagctatatttagtattgctaggctatagaggaagggagcgcacatggcggaaaacgataccgaccgaaacgaaccatgcgatcccgacatcgacgatacagccgctgcgcccgcctaccgcatgagccgcggacgcgttgcgctgctggcggtgctggccatcttgccggtcgtgttgaccgcgctcgcccaaccgtttctgccggatagcgttcccctgcactacggagcaagcggcccggatcgatggggatcgaaaggcgagctgttcgttgccgccggcatcatcaccgtcatcgcgttcgtcctcgtgacggtatacgccgtggtcgaacatcaacgagaaacggggcgggaggattggctcgtcgtcgacggtcccgtcaccagcatgtttcccgtcttctccatctgccttgcgatcattgattgcctcgacgccgcctacgtcttcgccgccttccagctgggaggcttctcgatgccagagaacatgggctcgctcatcggagggatcgtctgcctcgtcgtggcgctctccctactcacgccagccctgtacatgctgatcacgggcaagggcctctcgctcgtgaacttccatcccggaacgagcgacctcgagaaacgcaccggagccgacaaacagcaggcgcgcgccatcggcggtttgctgctattcctcaccgtcatcgtcctcgtggaattactcgtaacggtgaaatgaaaacgcacccgccactttcgacgggtgcgcgctagttgaacgcttgctgggtcttctccaaccctacctgcaccaaggacaacgccgcttgtgcgccgcggtcggtggcttgggcgaagtcgtcggccgcgtccttcttcggcttcgacagcacccagtccaccacgggcatgcgtcccggcgggcgcccgatgcccacgcgcacgcgatgccagtcgcgcgttcccagcttgtcgcagatagagcgcaggccgttgtgccccgcgtgcccgccgccgaacttcacgcgcacggtaccggggtcgatgtccagctcgtcatgcacgacgatcaggtgctcagcatccacgccgtacgcgttcatcagctgcttcaccggaccgcccgacgtgttcatgtagctttgcggcttggccagcaccaggtcgtgatcgcgatacacgcctttggtggtcagcgcgccgcattccgtcttccagtagcgcgcgcccacctcctcggcgatcaggtccacggcgtcgaacccggcgttgtgccgcgtatgctcgtactcctcgcccggatttcccaggccaacgatcaaaaacatcggaccctactcgaacagcgaggcaacggagccgttgttgtagacgttgctgatggtcttcgcgaacagcgggcccacggacagcaccttcaccttgccggtctggcgctccagcggcacgggcacagcgttcgtcaccaccacttcctcgatggacgagttcgcgatgcgctcgtacgccgggccgctgaacaggccgtgcgtcgcgcacgcgtacaccttctcggcgcccttcgccttgagcgtggtggcggcggcaaccagcgagccggccgtgtcgatcatgtcgtcgttcaggatgcacaccttgccgtgcacgttgccgatgagcgccgtgatctcggcctggttgtgcttcgggcggtccttgtgcatgatggcgatgtcgcagtccagcatggtggagaacttcttcgcggccttcgcgcggcccacgtcgggcgacacgacgcacagcttgtccttgtccaagcccatgctctggaagtagtcgacgaagatgggcatggcggtcatatggttcaccggcaagtcgaagaaaccctggatggcgtcctggtgcaggtcgatggtgatgacgttgtccacgcccgacgcggccatgagatcggccacgagcttggcggtgataggctcgcgcggggcggccttgcgatcctggcgcgcgtagccgtaatgggccaccaccgccgacaccgagcgggccgaggcgcgcttggcggcgtccaccatgatgagcaactccatgagcgcgtcattcacgtcgtagcccgcgccgctgcacaccgattggaccaggaacacgtccgcgccgcgcacgctttcctggtagcgcgcgtagatctcgccgttggcgaacttctcaagcttgacgttgccgagcgacacgttcagatccttcgcgatctcctcggcaagctcggggttgaccgaccccgagaacaaggccatgctcttctgcacttccgtcatgtgcgcgctccttcgcttcaccctcagggccgccgcaccgcgcagccgtcgccccctgtctcatcggcactattgtatccgcacgcgtcgcgcacgcacagggtgaacttcggcatcttcgcagattgaccgcaaggtctgacaagaggcaagcgcccaactccggacggagaacgctcagcgcacgatcttcccgtcctcgatgaggctttgcagctcctgcttggaatgcacgcccgccttcgcgtagacgttgcggatgtggcttttcgccgtgttgaacgagatgcccaactcgcctgcgatgtactcgatggtatagcccttccccagcaggaacagcacgtcgcgctcgcgcagcgacaggcccgcctgctcggccagcgcgttgcagcttttcgtccaggcgccctcgcgcggcgcgccgtcgccgtcgctggcgcccccagcgccctccggccccctgccgctagggaagaaatcgcccgtcccctggtcggtctgggcgttgcgggtcttcctgagcgccatgccgatggtgcgctcgttgaggatgaccatcgacaccaccagcagcacgaacaccatgcccatggcaagcgccaccatgttgctggggttctccaccagcacgggcgccagcgacgccccggcgaaccagcccacggtggtgcccgccgccgacgcgccgcggccccacccgaacacgcgcacgtacgacaggtcggtgcggttcgccacgttggccagcaggcaccacaccatgaggatgaacaggttgtacgcgatgctcacaagctcgccctggatgacgcccaggccgccgaacaacggcaccacgaggttgcccaaacacgtgaggatgatgatgggatagtacagctggctgatgtcgaactcgcgcaccagcagccccaccagcacgaacagcagcacggccgcgcacgccgtggcaaacacgatgatcacgccctggtccgtggccgccgacagcggctgctgcagcgccatgaaccccttgatcacgcccgcgatcaccgagaacaccgacaccgccaccacgaggcggatgaagtagccgcgcggaagctcgcgcacgggaacgacgtcctccgccggctcgctcggcgcgcgcaccgcggccatggtgaacaccaccgccagaagcggcaagctggccgccatcagcagccccaccggctggggcagcccgatgcagacgaagtacagcatgcccgcgaagatgaacgaccccgccgtgtacatgaaagcttggcgcgcgcccaccgtgctgtacaccgaacccaggcgcaaggcgacgaacgcggtgcccaccccggtgagcgagcaacccgccacgtacagcgcctcgccggcctgggcaggcgccgaccaggccaccaccagcgtggccagcgtcgccattcccgccagcaccgtcaccgacagccgcgactccacgatgcgcgccgtgaccttctggaacgccccggccacgatgagcacgaggcccagcgccgtcgtggaagccaggtacatcaccgacatggcgttgcccccgacggaagcccccgaccagccgaacagcacgtcgctgttgtagctgaggaaaatccacgcgtaataagctccgaagcccaggaacttcatgctgggccactgctcgtccaggtcctcgagcagccgcgtcgccgaaaaccgcgcgcgatcccgctcttcgccagccttcatctcacgcatcatgttcctcccctttacgcggcctcgcaacagcccgcgctccccgtaccgcaaaggcctattctaacacccgctcgtcctcccccgcttcgaccccgtcgccgtcctcgccgacgcgtttcggaagaaacggaaacgagatggcatgcatcgggcatgcgtcggcgcacgcacggcatttcgtgcactcgtgcatcggcgccgagccggatgcgtcgtgcaggtcgatgccctcgggacacacgtcggcgcactgatggcagggctcgcctttggacgagcgcaaacacgtcgcctcgttgctgacgggacgaaacgtcttgttcagccgcgacaccagcgacaacagcgcgcccagcgggcagaagcggctgcaccacttgcgcagcaccagcacctccagggcgagcatggccggaaacaccagcaacgacagggccacctcgttgaactggaacaagcgccacaccgcgatgagcgtggcgaacgtgaggcccaccgggcagatgagacagaacaccgggaacccgaacaccgccgtggacagcagcgcgccgcccagcacccagttgcgcgaatcggccgcgccgccgcgctgggcggcgggcacgtcgagcgcatcggacgcacgacgcttgcgcttcggctccttcaagccgaagatacgcctcagcagggggatcgggcagccccaggcgcagaacgcacggccgaacagcaccaccagcgcaataccgatggccagcgcgatgagcatcggcggcaccacggtcttgctggccagcgccgcctccgccgcgccgagcggacagatggccgcgatgtcgtagatgccccaggccgacggcgtgcccgtaccggtgtgcagggccagccccaggcacacgagcgcaatcaccgccaagacggacagcgtgcgcagcagtttggagttccgtttcatcacgcgctcatctcgctctcgtcctccaccaccgtcttccccagtcgcgcgtacgcgctgggactcaccaccacgatgccgcgccgcgtgccgcccgagaagctgcggtacacaagcgccgggcacacgtcctcgcacacgccgcagccgttgcatcggtcggcgtccaccacgggatggccgtctccatcaagcgcgatcgcctcgaacgggcaggccttctggcactcgacgcacccctggtagtaggccacgcagcggtccttctgcaccaccgccatgcccatcttgtcggcctccgggtcgaacgccccgatggctcccgtggggcatacgcgctggcagtcgccgcagaagtcgcagcttccccgatggaagttcagcttgggcgtgcgggcgcgtagaaagccgtcgccaacctccgccacgccgatcaccccggtgtggcacacgctgcggcagcggtcgcacttcacgcacgaggccagcagatgcagctcgtcctgcgcccccggcggccgcacgagcgcggtttcggacgcgccgtcggccgccttcaccgccccgccgaacgcggcgaatacggccgctgcgccgcagaaccctgcgaacgcccgtcgcgtgtacgcggccatggcttacgccgcctgggcgctctggccgatcatctggtcttccaactgcagaaagccctcggtgatgtcggcgacgccccgatagaacgcggtttgcgcgtacgcgcgcacgtcagcgcacaaacgcggcacccagttggccaggtgctcgtcgaagaacgcgcgttgcttcgcgcacagctcggcgtagcgcgcctcgtcgccagcatcgagcgccgcgcccgcgcgctcgatcagcttcgccatgaactggaactcgaacgacagatgatcctccggcgtggtgttgtcggccggcaggcccagctcctcgcccaggtagaacgccaccgcggaatcgcgcgcatcctgcatgagcaggtgctcctcgctcgtgtacaccgactcgtacggcggcgccatcagctgctcgtacatgcccgcgcacaagaacacgcgcgcgtagtccacggcaagctcctggcgcgtgcccgaatcgcgatggcgcaggtactccttcaccgtcgcgtatcccgcgcccacgtactcggcatccgtcggcaggtcctgcttcgtcagcgtccctatctgctcgtcggtcagttccagcttgtacatgcttgccaggaattcgtaaaagcccttgcgcgcggcgttcacctcggcaagctcttcgcgatcatgctgttccatggtgctctccttgcattccccgttggttaccggttccgttgtcgaccgatcgagccatacgcatgaggggagggggggggttgcgtatggcttgatcgagcggcccggtcgggggccgtcctccgcacgcgcgcaggacggccccttccccgccggcatcgtctacaggacgatgccgaagtagttggccaccgcggtgcccaccatccacatgacggcgcggaacgcgatggatccgatgatgccgccggcgaacgcgacggtcgccatggtcacggccgacgcgggcttgctgcgcgccagccatccgcacacgaggggcgcgagaccgccgcacacgagtgcgacccagaagatggccgcggcatcgcccgtcgccgcgccggacgcgaagccgaaggccaaaccggacacgagcgccagaacgccgccgatcacggtttccaagccggccagcttcacggcctcggcgctctctttcttgcaggcgaccagcagcaggtacaggctcaagccgctcgccgcgccgaagcccagatagcccaacggcagcgtgatggtgttccacgtggtgcgcgcctccatcatgtaggagtagccgctggcgaagctgaacacgatgccgatgacggcggccagcacggcaaccgccttgcgggctccggccgacgcgtcgcgcttcagcaggatcacgtacacggccacggccgcgatgaacaggccgatgagcagcgcttccaggaagatgcccggcgtggggtggctgagcacggccatgatgcggtcggggtgcgacaggtgcgtcaccgacgcgatgccgcccacgacggccagcacgagcgccagcgccgaagccgtgaggttagtgcgctgcgtcaatccacgcagctcgtcaacggccacgccgaccgacacccatgtgccgcagctggcgatcgccgtgaacagaacgagggaccattggatgtccatgctactcagccccttccatccactcgccgtgcatgctggtcatgatgtacttcgtgcaggggttgttgcccacgttcggcaactcgtgaatgtccgccgcatcgtacttcgccagctccttggacacgtcggagttcggatcgtccaagtcgccgtagaaacgggcgccggcgctgcagctcttcacgcacgcaggaagctcgccgttcgccgtcaggtggccgcacagcgtgcacttttccaccgtcttggacgccttgttccaatcgcgcacgccgtaagggcaggccatcatgcagtacttgcagccgatgcacttctcgcggtcgatgagcaccacgttgttgccgtcgcggtagctggcgccggtggggcacacgtgcacgcacggggcgtcggcgcactgctggcacatggtgggcagcgggtagcgcgtcatgttcgggtagtcgccgaagggcccgcgctgcagcatcttgttccaatgctcgcccagggcgatgtcgttctccatcttgcacgtgatctcgcaggagtagcagcccgtgcagcgatcgaggttcaccacaatgcagttatgcgccataatcgaacacctcctcggtgggatcgctcggctgcggcatccaaggctcgaactgctcgggctcggtccacacgccttccggagcagcggcgtcaggcgtgaccttcacctggaagccgcgcagggtataggtgccgtactcgggattgtacggctcgtcgttcttggtcagcacgttgatgttcatcacgcggtaggcgcgctcggggtcggtgtccagcagctcgggtgcccagaagcgctcctggtagatgacgcccttggcgatagccgtggtcacgcgcgccttcccgtgcgtctcgccgcgacggctggcgatggtgcaccactggccgtcctccacgccgtaggtcgccgcgtcgtcgggatggatccacatctcgggcacggggtagatctcgcgcaggtagggtatgttgcgcagcgtgccgtggtggtacataggcagacggccctcggtcagcaccagcggatactcggtgtccgtgagcgggctttcggccggctccttgtagtagcacagcggctcgtagtccttcgaggccggctccagcaccaggttcttctcctcgaagcactgcgaccaggggaagcccgtgcggcccaggatggtgttggactcgcagtacacctcgcacttcttggaaggcgtgccgaagcccttctccttgcccgtggcctcgtcaaccgccttatagccgtagtacgtgcggtactcctcttcggtgcaccactcgaacacgcccttctcggccgcctcctcccagctcatcttcaagttgttcaggtgcagcttctgcttctcgtactcgtttctgtacatggggatgccgttcgtgccctcggccgtgaaggcctcctgcgcgtggacgttgcccatctcggccatcttctgcacgatctgcgtccagatgaggccctcttccaccgtctcgaacaggtgggtgaccgcctggcggatgacgatggcgttcagctgcgggatgaccaggttggtttcaagccactcggcagaaggcagcagcatgtcggcgcacagcaccgagaacgcggtcgggtacatgaagatgtggcagacgaagtcgaggttcgggacgatctcgtcgaggcacgtggcgttgcccagcaccacgtgcttgttgccggagcgctcgaaccacgcgtggatctggtacggatcgccgtccttcatagccttgaacaccgcggggatgaacgccatgtcccagtccagcaggcccttgtgctcctgcacgcccaggcgcttgagcatcttgtccttgtgcaggaagcgcggcgtgttgggaatctggtcgcgcgccgggcagggcttgaagctttgcagcatggcgccgggcttctgcacgttgcccatgaggtattccaggttgagggcgccgagcgcgcactgctgcgactgctcgtactggtcgatgggcacgccctgcatgatgccggactggccggtggtgtagatttccagcgccttctcgatctggccctcgtcgagccagcagatttcggcggctttcgccagcgtgaactcgtcgacgctctccttcagcagctggccgcccgtggggtactgcttgccgtcgatctcgtaggagccgaacagcggcggcttcacgccttcgttcatggggtattccagcacgacgggcttgttctgcgccggatcccagatgacgtagtccttgtcggttccctcgaggccgcactcggtgggcttgagggtcaggcgcgtctccgggttcacgaggtagggcatgttcgtccagttcgtgcagaagtcctcgtcgtacttcttgttgtcgatgatccacttcgtccacgccatgagcagcgcggcgtcggtgccgggacggatgggcagccacacttcggccttggcggcgtccatggtcatgcgcgggtcgatgaccacggtcttcaggcccttttcgcgggcgcgcagctcggccagcgcgcggccgcccgtggccacggaactgttcgacgggtcggtgccccacagcaccagggagtccaccggcgaatcggtgaagtagtagtcccagccgttggagtcgctgaacgacaggttgttgggcttgcccatgccgttggacagctgcgaggcgcccatgcgcggcaggtagcactgcgcgcagccgggctcccacacgttgggcgtgttgatggcctcgccgaagcgcttcacgttgctgaagtgcgggtttccgccaccaccggtggacacggccacgcattcggagccgtacttctcgtctatctcgatgagcttcgtggcgatctcagtgatggcctcgtcccaagtgatgcgctcccactggttctggccgcgctcgcccacgcggcgcatggggtacttgttgcggttgggatggtacagcgcctggatgccggccatgcccttcgcgcacaggccgccttggctcatggggctttcggggttgccctcgatcttgatgacgcgaccgttcttcacatgagccagcacggcgcagcttgcgatgcaggcgcggcacgccgtcttcacgatcttcacgtcgccgccggtgtcggcgtgcgccggatccacgttcaccaggtcgtcgctcacggcgacgcccaagccgcatgcggcgcccagcgccgccgccgacttcacgaaactgcgtcgcgtgatggttggctgtgtcatgttccctccttcttctcgtcttcgcttgcttgtttgcttgctatctcagatgggagcgcccgtttgcgcgggcggcgatcgagcagcgctttacccgaccagggccagcatctgccggccggcttccgtggctttccacgaaccgtcccatgtaagaccacccacggtctccagcttggagatgaagtagctggggaatacctgcttcggattgctcagcgcagggttgccctcaagcgcctgctcgatggcggccttcgtcgcgccgtcctcgcacagggcgagcacgatggcatacgcctgcgcgtagccggcaggttcgtcttgcaacatgcggccgaaccgcttcgtcggctcgaaccgcgccagcgccgccctgcccgcctcggtggtccgcaccgtgtagtcgacgggctgatcctgcttctcgtcgcccggctcgcacgccggctcgggaacctcctcggcttccacgccgccgcaatcgatcatgatgcgcagcagcgcgtgggcgttctgcgtgctgaggttcagctcgggacgctggccgatgagcgtctcggcctcgcgatagggcatgcgcgtctcgcagacggcaaggcacgcgcacagcgccagcgtgttcgcgcggttcgccttgaggcgcttgacgacggcttccaccgtgtcgtcgaaactttggtcggcagcaacggcgtcggcctggttcgcgtcggcacgctgattggcagcgtcagcctgggtcgcgtcggcgcgctggtcgtcttgtctcatgatgtcccccgtttcgctcgtctgataacgccccgccgattcctcctctcggcttcgagcgacttcaccttacggcgcgacggacggacggaaaacgtccgtagttcgtgaaaacgtgcggcaagcaaggatatttatgggtgacgaacgccaccaataatggatgagtaagggtgttgatcaggtaaaacgtcttgaaagcgtacgaaacccctctttgctggcacacgatcagactttgttgctatacatttatatagttgctatactatatggcatagcattgtcgaagggaggtttgttatgtcgacggaaatggcgcagatgaacacgcgcatcagccgctcgctcaaggagcgcggcgatgcggcgctggagaaggccgggatgacgccgtcgcaagccgtccgcaagctgtgggacttcgccgcccgcaattcgcataacccgcagatcatacaaagcctgttcgacaccgaagacgaagcggagaaacgcgaagccgaggaagagcgcgcgcgaaggcgggccgtcgctctcaaaagcgcgaatatcgttgccgacgcgtacgaacgagcggggatcgagccttcggagtggacgaagaacgcgtcgtacgccgagatgcgcgagtacgccttgatggaacgcttgcgggagcgaggcctcgatggttagccaacggccctccctcctcatcgacacgaacgtctggctcgactatttcctccctgatcgtgcgggaggcaaagaggcgatcgacctcatcgtattcgctttcgagtacgaattccctcttctttaccccgctgccatcgtgaaagacgtgttttacgttgccgtctcgacgttcaagcgcatcgctcgcgcagagaagggatcgctcacccaaagcgacgcggtaacggcaaccgaaaccgcgtggggatgcgtgaaaagcatgcgaaaacaggccaccgccgtgggcgcggacgaatcggacctctggacggcgtgcaacctccgcagcgtccacaacgacctcgaggacaacctggtggtggccgctgcgcaacgggcggacgcgacgtacctcgttaccaacgacgaggcgctcatcaagcacgcccccgtcgccgcgctcgccccggccgacgcgttggcgctgctgaaagcgacgttgtaggaaagcttcgccttcccgatcatgggcgacgcctagacttgtcatcctgagcgcaggctgtaggccggagtcgaaggatgacaagatgcttactcctgccgctcgcgcttcttcgcggcccacccggggatttcccgttgttccgggcgcgtcagagccagcgcgtcgggcgccacgtccttggtgatgcaggagcccgcgccgatgatcgcgcctgcgccgatgttcaccggcgccaccatcatggtgtcgctgccgatgaacgcgccgtcgccgatggtggtggcgtgcttcttcttgccgtcgtagttgcaggtgatggacccggcaccgacgttcacatcttcgccgatggtcgtatcgccgatgtaggacaggtgcggcaccttcgagcccttccccaccgtggacttcttgatctccacgtgggtgccggccttcgcgccctcgcacagatgcgccgccggacgcaggtacgcgcgcggaccgcatgtggcgccgtcgtcgatctgcgcttctacggccaccgtctcgtccacgacgcagccgcagcccaccgtcgtgtcggtcaggcgcgagtcggggccgatgacgctgtcctcgccgatgctggtggcgcccatgagcgtgacgttgggcagcagctccacgtcctgcgcgatggccacgtccggaccgatccataccagctcggggtcgatcatggtcacgccggccgccatatgcgcacggttgatgcgacgctgggccagcttcgtggcctcggccagctggatgcgcgagttcacgcccaggcactcggcagggtcgtcgcaggccaatgccaacacgggacggccagcgttgcgacagatctccagcacgtcggtgaggtagaactcgccttgcgcgttatcgttgcccacctgcccgagcgcgtcgaacagcgcccgcgcatcgaagcagtagaacccggaattgcactcgcagatggccgcctcctcgggcgtggcgtccttctgctccacgatacgcgccaccgcgccctgctcgtcgcgcacgatgcgcccgtagccgaacgggtcgtccagctgcatcgtgagcaccaccacggccgcgtcgttctcctcgcgcacggccgcaaggcgcgcgatggtatcggccgtgatcagcgggcagtcgcccgacagcaccaccagcgagccgtcgaaatcggctagagcgtccttgcacacggccacggcgcccgccgtgccgttctgctccgtctgcaccacagtctgcgtgtcggccaccagcggctccacctgctcgcgcgcgtgccccaccacggacaccacacgctggacgcccgcctcgcgcgccgcgtccaccacccagcggacaagcggcttgcccaacacctcatgagcgaccttcggctttttggacttcatccgggtgcccgcacctgcggccaacacgatagcggcagcttccatatcgctccttcgcaacgcagttcatcaaggttaaaaagtatagcgcaacggcacgatcaccgttcgtttcgagagtcggtatcgcccgacacgccctccacgtcctcttcctcgtggtgcagggcgcggcgcagcgcttcctcgccgccctcgcgcagaagagcctcctccacgctgagcagcggaggctttccttcgtcgttgaaatcctcctgcactttttcaagcaggtcgtccttgccctcctctttcagcacacgcaccacctcgttgcgcaccgcttcgcgcacgtccccgatggagccgccgcccaaaagaccggtcggccctagatccacgacgatctcgaacacgccgccgcgcttcttcgccgcctcgagctcgctcttgatggcgggatgatcctcgatgccgcgcagcagctcctccgactcgcgcgcaacctcgctgccggcagtctgacgagccacgtcgtcgctcgaagccgaaacgtacgccacgccgcgcttctgcgcagccttcgcctgcagcagcaggaacacgaagcccagcacgcctgcgatcagcgacgccgccaggatggccagcttcgccgtggcgatgtgcatctcgtcggtgaacgcgaggttcgccacgaagatggccatcgtgaagcccacgccgcccaggatgctggcgcccagcatatggaaccagttcacgttctcgggcagcgaggccagcttgctcttcacgatgatgaagctcatgagcatgatgcccagcggcttgcccagcagcaggcccagcatgacgccgtacagcaccgggtcggcgagcatggcgcccacgtccatgccgatgaagctgacgtcggcgttcgtcaacgcgaacagcggcaggatgccgaagtacacccacgggtacagcttgtgctcgagacgcgtcgccggcggcaccacctggcccgccacgcggctgagggccgtcacggtcttgatgtagtcgccctgcgcgataaccggcgtttcaggctggaacgcatcgcgcgcctcgcgcaccttgtcgcccgaccaggtaatgaagctcttaagattcacgcgcgaccccgaggggatgacgaacgccagcagcacgcccgcgatggtggagtgcacgcccgacatgaacacgcagtaccacagcacggcgcccaccagcaggtacggcacgagcgagtagatgtggttgcggttcatcagcacgagcaccaccagcacgacggcggccatggccagccagaacatcgacgggctgtggccgtagaagatggcgatgaccaggatggcgatgatgtcgtcggccacggccagcgtgctgaggaacacgcgcacgccgctggggacgcggttgcccagcagggcgaggatgcccagcgcgaacgcgatatcggtggcggtgggaacgccccaaccttgggcggtttcggggttcgtcgcgttgaacaccaggtagatgccgatgggggccagcacgccgccgatggccgccatgatgggcagcagagcctggcggatgttcgtcagctcgcccaccgtcagctcgtacttcacctccaagcccaccagcaggaaaaacacggccatgaatatgtcgttgatcacatgcgccagcgacatgcccgcgaacgcgtcgccgaagaagaagcccgcctcggtatgccagaattccaagaacgcctcgtacgcgcccgtgttcgccacgatgagagccacgacagccgccagcagcatggcgccggccgccttggtggacgaatgggtgaactggatgagtttcctgtatcgtgcctgatgacgctgcacttcgctgatgaagatacgctgcgttccgtcttggttctgttcggtcatggtgccctttcggcttcgtcttttggggtattatccctcatttgcccgatacgttcgcgcaattgttacccgtttttagatcgatttcacaacagatcaaaatgaccgggcaaaacgctgagaattgcgctattctgtactcatcagcttaggcgttaggagtcggcttgggattcgcgtggagggcatatcacccgatcgctcgtatgaccaggtacgacgacggcgaccgagctgtttttttattcgccacgaggtaagaggtgatcgctatgagcattaccgtcaccggacgcaagatgcctgtaaccgacgcgcttcgcgagtacgccgaggagaagatcggcaattccatgaaggtcatggacatcgacccgcttgttgccgaggtcgtgctgttcgtcgagaagaaccctgccaacccccgccccgccgtctgcgaagtcacgctgcgcacgaagggtcacatcattcgtgttgaagaacacgaagaggacatgtacgcggccatcgacgtggccgcagccaaggtggtccgccagctgcgcaagtacaagacgaaggtcgtcgaccgcaagctgcgcgccgccgacgaaaccatccgcatggccgagcctgccgcagcgggcgagctggacgtagacgggctcatgcaggaacttgccgccgatgacgaagtggtgcgcgtgaagacgatcgagttcgagccgctgaccgaggaggaagcgctcgtgaagatcgacctcttgggccacgacttcttcgcctacaccgaccgcgacagcggcctcgtgaacgtgctgtaccgtcgcgacgacggcggatacggcctgctgaagcaggcggaggagtaagcggtttcgcctcctcaacctcgcacgaacgaacgccggcggattccacatcgccggcgttttcctttgccgtgcgcgccgccctcagtcggcgaacaggtcgatgagctcctgcttcgaatgcacgccgagcttcgcgtagatgttcttcatgtgcgtgcgcaccgtcgcgggcgagcacaccagctcgtcggcgatgaacgcggccgagcggccccgcgcaagctgcagcatgatctccgactcgcgcgccgtgatgcggtattcggccgccagctcttcggcgcgcgccgcgaaacgatcctcctcggtgaccacgatcacgcgcttctcgtcggtcgacggtcgccgccgcgtcaggtacagcagcagcatggaaagcccgtacaccgccgcgatggtgacgatccagtacaaaccctcggcctcgctgcccgacgctcctcccagccaatagcccgccatgccgaacagcagctgcgacaggcggatgcacgccgtggcgaacgcgaacagcacgtacgtcttgagcttcttccgctgtatctggcacaggatgaagtacagcgcgctgaacgagatgaactcgtacacgagcaccagcaggccctggagcgcttgcgaagcccagcttcccagcgtgagcggcagcagcaccaccagcgccagcagtatcgggaacagatagcggtacagccgctccacgtccaccgcgcgggcgacgacgaccacgacgaagcagaacacgagcgccgccgaaatggccccgacggcggagatgatgcccgacccgtcggtggcgacgccgaggaagaacccgttgaggatgctcaccgtcgcctcgaggacgatcgagaccaccaacgcgtcggcgattcccatcgcgccctggcgatacgccttgaacgtcgcgggcgccgcgtcgtcttcggaggaatcgagccacgcgcggcccctcgcgcgcagcagcaacgcgaccgcgccgacgagcagcacgcccaccgcgacgacgaacggcacgcccatgaggctgccgcacgccaacgtgatcacgcttttcaccagcatgcccagcgctaggatgcccgcgatccgcgccggcgtctgatgggccaccacctcaagccacgagaggttcaagcacgtcgatgcaacgccgtacgtcagcgccaggagcacgaacacccccgatgagccgggggcgatccaaggagccacggcgggggcggcaaccaggagcagcagcagtgccggcagcaccacgggcaggcggaagccgagaatgaggcccttccacgcaagcgccatcaccgcgagcgcgcacagcagcgacgacagcgcggttgtcatggagaacgacatgtcggcgatgaacagcgtggacgtgggaaccgaagcgagcgccgaagagtacagcagggaattggcgccccggaacagcccgtatcccagcgcaagcgccagcgtccgaccgttgacgaagaaccggcggtagtctgctgcctgcgttgtgtagcggctgtcttgcatgatcccctctcgcgtcaagtacctccgtattctaaccgttgaacggccccgatgccccgcacatctcgcgcctcaaacggccaaaacgaaaaataccgcaaaacagggcagagacgaaacggggcgaaataccgcaaaaggcggcaaggtgaaccgccgtcttcgaggcagaatccagaaagcaagggtacggggcgagcggatgcgcgcccctctgtcagaagggatgaaccatggaagaacaatctcagggcaagcagctcaaccgacgctcgttcattcagggtatcgcggcaacgggcgctctcggcatcatggcgggcgcgggcctgtcgggatgcgcgccgcagcagcaaagcgccgccgccgaagcgccgcagcaagaggcgggtgcgagcgcaggcgaagtgcacgagtgggtcgacgcggtatcctccgcgagcttggccacgaacaagtacaccaccttcaccgaaacgcagctgcaagacgccgtcatggcgtaccagaccgaatgcgtcgtctccacctcgaacgaggacggcacgccgaacatcgccatcttcgtgcccgcagccatgatcgacggaacgtacgtcgcgttcgcctgggccgaaaaccagacgaaggcgaacttcgagcgggcgaagatcggcatgatcgccttcgacgtgccgaacccgacggccgagacgaaggagctgcgccaccagggctcggtggtgaaagcgaccctcgtggaagacgaatccgtcatcgggaagctgaaggatgccgacgagcagcttgccgtgtgcacctttgtggagattaccgaactcctgcccgtcggttaactcttcgcgcgttgtccgatacaatgggtgccaccgaaaccagacgataggagcggcatggcaaccatcgacaccatcaagaccatcctcgaggagaacctcgacatcgacccgagcaccgtcgaggaaagctcgacgttcgactcgctgggcatcgactcgctcgacatggtggagctgatctgcgacctcgaagaggcctgcgacgtggacttcggcgaacccgagggcctcgacaccgtgggcagcctcgtggagtacatcgactcgctgtaagcgcgaccgcgcacgcagcgccatccagcagcaccgcgaaggcccgccgatcggcgggccttcgcttgtccagggagaatcgggccagcggaaaaccttacgcgagcgccgccttggccgcgttggcgcccgagaagcggccggaggtgtaggaccagttcagaccacacccgcccgccgggtagtcgtcgtagatgaacgtgccgcagcacacttcgccggccgcgtacaggtgcgggatgggctgaccgtcggtgtcgagcacctggaactcggtgttcacgcgatagccgccgaagctgccgtgcgtgcacacgcccatcgtcagcacgtagaagggagcctccgcgagcgggacgaggttctcggccttcttcttgaactgggtgtcctcgccggacgcggccagctcgttgtacgcgtcgagcgccgtctgcgccgcagcgccatcgatgccgagcgctgccgccgcctcggccaccgtgtcggccttcgcgaacatgccctgctccaagccgaagtcgagcttgctgcgcagatcctcgtcaagcgcgtccaccatggcctggtcgtacaccgcgaaaaacttctgatcgtcgaagtgcgccacgtcgtagtagatgtcgtgcgtctggccggcctcgttggcgaagcgctcgcccttggagttgatccacagcgccttgttgctgatgagcttcgactggcccggctccacgggacaggcgaggatgccgttcgtgccgccgtggcccacgtagtccgcgccgatgtcgaggcccatctgcagcccctcgcccgtgcagccgacgcccacctcggtgtacacgcccgaatagtcggggcagtactcgtcgatcatctcgacgttgcggcagaacccgcccgtggacacgatcgcgttcttcgcgttgtagagcaccgtcgagccgttcccacgctttgcgagcacgccggtcaccgcgccgccgtcatcgaccacgagcgattccaccgtggtgccgaagtggaactcggcgccgtgctcctgggcgtacgccgtgacggcgcgcagcgcgtccatggcgttgttggcgcagttgtggccgcgcggcaccgggtccttgcccttcttcgacacggtctccttgaagagcacgcccagctcgcctgtcaaccagtcgatggtttcgccgaagtgctcggcgcagaacttctgcacgtcgtagtccagcttgtcgccgccgcgcgacaggaagtagtcgagcagcccggacggatcgtcttcgatgcccgcggctttctgcagctgcgtgcccgcgccgtagaacgtgccgatggccagcgagctggaaccggccagccacgccatcttctccagcagcacggttttcgcgccggcggccgcagcctggcccgccgccgtcacgccggcaccgccgccgcccagaaccaccacgtcgaagtccaccgtctcgtgcgcctcggccgccgcggcctgctgcggcgcgcagccgaacaggctgcccagcgccatcgtggccaaaccgcccgtcagcgcctgggcgaactgccggcgcgtcagcggcatggaagccctcgtcctctccgtggtagcggtggcggtgcgtcccgtcttgattcccgtcatgattgatcctttcctccctggggtgatgcttcatgccctgcactctacgcacgatgcgcgcacctcagaagccaccttccgggtgaaaaacacccgatgccgccgggtttcacccggaaggtgtgaggtgtgctctacgcgtagtgcacgcgctcgggcgtgctcgtatatactggttgccgtacttcgtccccctgcaagaatcgaggatcgatgccgcacgcgagcgcaaccgctcgaacgaatcagatgcgcgccctcatgggcggcgccttcctgccgtcgtttctggggctggcggccacgcgtgtctggctgcaggtgaacctgttcgcgtcgtacacgcaaagcgacgacgggctgttcacggtggtcaacaacctcgcgtacggcctggtgatggtcatcggcgcggccatcgcgctgcgcaagccgttctcgaagggcaaccgcacggcggtggcgtggctcggcttcgccgtcatgacgttctccaccgtgctcatcctggcgggcaaggaaaccggtgccgtcgatatcttggcggtggccagcgtgtgcgccggcatcggcggcgcgctgggcggcggcatgtggacggcggcgtacgtgcggctgggattgcgccagtcggtgctgtacgggttcctgtcgctggccctcggatcgctcggcggcctggcgctcagcttcctgcccgaggcgctcagctacacggtgagcatgttcatgccggccatcgccctcttgtgctaccagcgcgccatgaagaccgacgtgggaccgcaacccgcgcccgagccgatctacgacaaagagccgcgcagtaccatgctgttcatcttcggcggcctggccgtgttcgggttggcgctgggcatctcgcgcggcttccccgccggcgagcccgtgcccatggacgcgctgcaacgcgtcgtccaccagatgggcgtcgtggtgatcagcctgttcatcatctggtggttcatcgtgaagcgcaagcggctgagcttctcgttcctctggcgcatcgagatcatgctggtggccgcgggcatgctgatcctgtcggtgttccccgggcacttcacggggctggccatcgccaccgtcaacatcgccgacacgctcatgctgggcgtgctgtggatcacgctgcaggacgtggcgcgccacaccaccaccgacgtgtacgccgtgtacgggttcgcctgggcgtcgcgcgtgctgtcgcgcgacgcgggccgcgtgctgatcatggtgctgggcgcgatgggggcctcgtcgtacgcggtgaccgccgtcatcggcatcgtggtgttcgcgctggccgccagcatggcgctgctgctgtcggacggcattttgaagctgcggccgctgttcaccgaagacgtggcggctcccgcccggcgaagcgcggtgagcgcggcgcgcgaggcgaggcgagcggagatggaaggggcgggagcctcgacgccggcccccgcggcgatgccgagcgcgcaggcccagccggacccgcaggagtggttccgcgacgcgttcgacctctcggagcgcgagacggaagtggcgctgctcatcgcccagggacgcagcaagtcctacatcgccgaggcgctgtgcctgtcggagaacacggtgcgcacgcacgccaagaacgtctacacgaagctcgacgtgcattcgaagcaggaattgatcgacctgctgcagaatagggaatagaggcctatcctcttccctagcgcggcggaagcttcggcatgcgcgcgtcttgctccgcgccgatcgcatgccgcttccttgccgaatcggcgcaacgtgcggtcgctagaccgcagacgccctttcgcgccatggggaagggctgtcccaacgcacgcattccgacccccccccgcagcgcccgggcagaagacgtctacccctccagctgctctttcagcgcgcctaccgagtacaggctgccgaacgcgcagatgaggccgtcggcccccgccagctcgcgcgccttcgccagcgcgtcggccatgtcgcgcgcgacgagaggccgcatgtgcgccgagcaccccagcacgtcctgccccgtccagcggatggcgcgcgccagcctgtcggcggaaagcgcgcgcgggttgtcgggcgtcaccgccacgaaccccccgacgagcggcatcacggtttccagcatggccgggtagtccttgtcctccagcacccccatgatgaacacaggcttgcgaccggggaacacgtcggccagcgaatccacgagcgcgcgggcgccctggggattgtgcccgccgtccacgacgacggtcggctcgccctcccccgcgcgcacgatctcgaagcgccccggccaggcggcgcctgcgacgccctgacgcaccgcgtcgtcgtcgacggcccatccgcgcgtgcgcagcgcttcggtcacctcgatggccagcgccgcgttcgccggctggtacgatcccagcagcttcgtgcgcaggtcggcgaagcgcccgtacgagaacgagcgcgcgggcgcgccggaagcgccccaatccaccgggcccacgttcaagcacgcgaaatcgggcacggtgagcgtatcgcccgccgccgcgaccgcctgctcgaccacggccatcgcttcggcgtcctgcggccacgacaccacggcggaccccggcttcacgatgccggccttctcgcccgcaatggcggccagcgtggtgccgagcagcttcgtgtggtcgaggccgatgcgcgcgatgacggccgcctcgggcgcgtcgatggcgttcgtcgaatcgaggcgcccgccgaggcccacttcgagcaccacgatatcgcagcctcggcgcacgaagtgcacgagcgccaccgccgtcatcagctcgaactcggtgggatggtcggccatagcctcggcctgccccttcacgagcagcgtcgcctcggtcagctcgtcgagcgtgatgttggcgccatccacgcggatgcgctcttcgaacgtgatgaggtacgggctggtgaacagccccgtgcgcagccccgctgcctggaggatggaggccaggtacgcgcaggtcgagcccttcccgttcgtgcccgccacgtggacgaacttgagacgatcctgcggccggcccagccggtcgagcagctcgcgaatgcggtcgagccccagccgcgactccaaccagcgcggctcgttgatgtaggcgataggatcgaacgacatagggacctcctgatgagatggggatcgaggcgaatgtttcacgtgaaacattcgttcgcgcacaagcgcgaaacgcgcgggagcgaagcgacccgtgcctcgcgcgcagcgcgagaacaaccgcgcgggtggtcgggcgggagcgaagcgacccgcccatgcgcccgcagggcgcataatgggcgcgcgggttggcgcagtaagtcagcgaggggcgctgtggtgcccgagatcgtggggagggcgagggcgaagcgtacttcggtacgcgagtcctcggcctcgccgcgagatcgggtgccacagcgccccgcagcgtcggcgggttccgaaggccgtcaggccttcggaaccagatactccgcaatgcccgccgccgcgcgcttgccggcgcccatggcgaggatgacggttgccgcgccgatgacggcgtcgccgccggcgaacacgcccggcttcgacgtggctcctgtgcgctcgtcggccacgatcaggctgcgcggcgtcacctcgagccccggggtggtcttcgcgatcagcgggttggtcttcgagcccgccgcaaccaccagcatgtcgatgtcgatgacgaactcgctgccttcgaccgccgtcggacggcgccgcccgctcgcatcgggctcgcccaactccatgcggacacactcgacgcccgacgcccagccgttctcgtcgcccaggatgcgcgtcgggttcgtcaacagctggaagtgaatgccctcctgctcggcatggtgcacttcctcggcacgcgccggcatctcgtcgcggccgcggcggtacaccacggtcacgtcggcgcccaggcgcttcgccgtgcgcgcggcgtccatggccacgttgccgccgcccaccaccacgcacttcttgccggcgtacaccggcgtctcgtactcggggaacagatacgccttcatgaggttcacgcgggtcagcagctcgcttgccaccgacacgccgttgaggccctcgccctcgatgcccaggtagctgggcaggcccgcgcccgtgcccacgaacacggcgtcgaagccgcggtcctccatgagctcatcgatgtcgtacagcttgcccaccagcgcgttcacctcgaacgacacgcccttgtcgcccagcttcgacacctcgcgctgcacgaggtccttcggcaggcggaactcggggatgccgtaggtcagcacgccgcccaccttgtgtagcgcctcgaacacggtgatgtcgcacccgcgcttcgccagctcgcctgcgcaggtcagcgatgccgggcccgagccgatgaccgcgacgcgcttgccggccaagtccttcgacacggcgccttccgcgctgcgccaaatgccgcaggcaacctcgtcgcccgcggcgcattcgtcgcgaagcccgtccatggccgcagccgcctcttcgggatgctcgaacgcccagtcggacgtgaagcgctccaagcgcccgatggccacaggctcgccgttcctgccgcgcgtgcacacgccctcgcactgcgtctcctgcgggcacacgcggccgcagatggcgggcagcgagttcgcgcttttcacgatggcgtacgcgcaggcgaagttgccctcggccacctgcgcgatgaactgcgggatgggaacgcccacggggcatccgctcacgcacggcgtgttcgggcactggatgcagcggcgcgcctcggccattgcctcctcttcggagtagcccagcgccacctcctcgaacgtctgcgcacgctcgacgggatcgagctccggcatggggacgcgcgtcttctgcttgttggcttcgtagttcatccgcgccatgctaggcccccttccgctcggtcgaatgtcccaaatggggactgtccccatttgggacactggtgcaatcgcggccttcgcgcgccgcgctctcgaagctgcggtacatgacgccgcggcgcatggcgtcgtcgaaatccaccagatggccgtcgaagtcgggcccgtccacgcatgcgtgcaggtactcgtcgcccaccttcacgcggcagccgccgcacatgcccgtgccgtcgatcatgagcgggttcatgctgacatacgttttgatgccgtagggcttcgtggtggcggccacgaacttcatcatgatgacgggccccacagccagaacgaggtcgtagtccgcgccctcgtcgatgcgctgctgcagcgcctgcgtcaccaggcccttgtttccgttcgaaccatcgtcggtcatgatgatctggcgcgtggaatgccggtcgatctcgtcttccagcagcacgaggtccttgttgcggaagccggtgataacatccacctcgcagccatggtcgtacagccacttggcctgaggaaacgcgatggctgttcccaaaccgccgccgatgacgcacgcgcgcttcgcgccttccagctcggtggggttgcccaacggcccggcgaagtcctgcagcgcgtcgcccgctttcatctgggcgaggcgtatcgtggtggcgccaaccgcctggaagatgatcgtaatcgtgcccgcctccgggtcgcagtcgttcatggtcaacgggatgcgctcgccctgctcgtcgatgcgcagcatgatgaactgacccggcttgatcttcttcgcgatctcgggcgcgcgcaccaccatgcgcgtcacctcgggattgagcgcctctacctgttcgatgggatacacgtcactgcccttctcgtctcagatacaaaagcagcaccgaaagcggtgccgtctcgtagatgtggccgtcagtatagcaaaggcgctgccgcacctatgttacgagcatgtttccacccggccagtggaggaaatcgcgccggaagggtttctcaatgttctggcgtgcgtcaacaatcccccaacggagcaaccggagagcatgcagggaggctcctgcatggtaagctggggaatcgtccggtccgcgggcaagacgcccggggtttcgtttgggagaacgcgatggctcacctctactttctgcacaaccgcctgcaagccgccccggcaggcacgcccatcgacgccgatcagccggtggtcgaagtgctcaactcgctggaaattggcgaggcctgcttcctcagctccgagacgcgggagtcgctgcgctccatatacacggtcgagaacacctacctcgatgtgttcccccactgcctcatcggatcgttcgccgtgcccaacaagaaccacatcctgttcgacccgctctgcttcgcgttctacttcgacgccacgcatctggtgttcctcgacgacggcaccacctgcgcgcgcgttctcgaggaaatcgcctcgcaaggcgttttgaagcagcccaccgtcggtcactgcctgttcgagttcatgaagatgctcatgaagaacgacctctccttcctggccgatctggaggatcgcatggaggacgtggaggagtccatcatcgatcgcggcaagaacgccaacagccgcaccatgctgacgttccggcgcaagctgctgcgcatcgacacgtactaccagcagctggtggacatggccagcggcatagccgaaaacgagaacgggctgctcagcaaggaggaaagccgtctattcctggtagcggaacgtcaggccgaacgcctgttgaagcgctcgctcaccctcaaggagtacagcttgcagttgcgcgaactgtaccagacgcaaatcgacctgcagcagaacaacacgatgcagttcttcacggttatcaccacgttgttcgcgccgctgacgctgctgaccagctggttcggcatgaatttcacgaacatgcccggccttgactggcgctggggctacgaagccatcatcgccgtatcggtaatcatcgtcgtgatcgaaatcatcatcttcaagcgcaagaagtggctgtagtgcctcaccccctcccgcgcatccaacgaaggcccagatggcaaaaaagcatcgaattcggaagttgccgcctgggatcgactgcgagccgaccgtgctccggataaccaccccgcataatgcctgattgcgaagagcacttcttctggtgccgcgcacggcgcttgctcaaggcttgcgatgcattccgaattcgatgcttttttgccatttcggcctcgatccgctgcacgagcgccaaaggggcaatctcgaaccgaagggggctgcgcactaagccagccgctaacgaaagaaatcagctgttttttcgttacgctgcgaaaaggccccgctatcgaaagaaacctttcgttaacggggctgtatgaggcaaggggacggacggcgcttgcgtcgagccgttacagcagcggcggttgctcgacgtgcgggggttcggcggctttggcggcggcctccgcggcccgttcggcttcgcttgcgcgcaacagctcgcccagcgtggcgaagtcgttctccagcgcctcgcgcttggaaccgtcgtacagcgcggccgccgggtggaagatggggaacaccttgaacttgccggcgcgctgcacggtgccgtgcaggcgcgtgatgccgatatccgtcttcaggatgaacttcgtggagaagttccccagcgtcaccaggaactcgggatcgatggtgcgcgtctgctcgcgcaggtacggcgtgcacagctcgatctcctcgggacgcgggtcgcggtttccgggcgggcggcacttcagcacgttcgcgatgaacacgtcctcgcggacgagcccggcgacggccagcagctcgttgaggtacttgcccgccgcgcccacgaagggctcgccttgcaggtcttcgttcttgcccggcgcctcgccgatgatcatgacgcgtgcttcgggattgcccacgccgaacaccgtctgcgtgcggccgtcggccaaggggcacttgcggcacccttccacctgcgcgcgtatctcgtcgagcggaatatgcggcttggtcatgcgaatcccctttcctacacgtacacgcgcggcatgcgcaagctgaacccgcaggccagctcgtagttgatggtgcccagcgtgttcgccatgtcgtcgagggtgatcacggaatcgccctcgcgtcccaccagcagcacctcgtcgccaatcatcggatcgagccggcgccggctgccgtacacccgcagatccacctcgaacatgcactggtccatgcagatgttgcccacctgatggcagcgctgccccttgaggatcacgtcggtgcgccccgacaggccgcgacgcaggccgtcggcgtaccccacgggcacggtgcatatcttcacgctgccgggactgcggtagttcatgccgtagctcacgccctcgctcatgggcacggtgcgcacgtcggtgatgcgcgcgtgcacgctcatggcggggtgcaggtcgatcatcgggcgcgtgacgcccgacggatgcaggccgtacatggctatgcccaggcgcaccatgtcgaactgcacgtcaggatagcggatggccgcggccgagttcgccgcatgcacgatgccggggttgacgcctgccgtgcgcagcgccgtgacggcctcgatgaaccgcttcacctggatctggaagtccaacgtctccgcggagtcggccgtggcgaagtgcgtgaacgtgcccacgaggtcgagcgcgcgatggaagctcacctgccccatgaactcgaccacttcgtcgtggcgcacgccgatgcggttcatacccgtgttcaccgccaggtggtacggagcgcgcacgccgtacgcgtcggcggcctcggcgtactggatggcgaactcggaggtatagacgctcggcatgaccttgtaagccagaagcagcgggatggccatctcgggcggctgcgaaagaacgaggatgggcgcgtttaccagcgcctcgcgcagctcgatggcttcgttcaccgtggccacgcccaggtagtcggcgccggagttgagcgcggtcttggcacagcgcaccgcgccgtgaccgtatccgtcggccttcaccacggccatgaggcgcacgccgttgtcgatgcgctgcttgacggcgctcgtgttatgacggatggcgttgaggtcgatctcggtccacgaccagcggcggtcgacgtcgggaatgaggcgcagcttgtcggggtcgaattgggccggctcgccgtcgggccgcgcgtggtcgcgcgcgtactggaacgcgccctccgctccgctgctgaacgccgccgtggccgcctcgtacgcgcccttgttggccgcgttgcccgccggaggctgctcgcctacgtatcgcggcgtacccatcgccgcgctcgccgacacgaagccgttgggcctgcgttgcgagaaaccggtgaacccgttgggaagatcctgtgccatgctctacgcctttcagtcgatcgggcatcagtatagcacttgggatcgtggcgaagcccgccctcattcatgcagcatgtccaacagctcttgacgacggtggatgtcgagcttcgtgtaaatgtgcttcgcgtgcgtgcgcacggtgttctcgctgatgaccaggcgctcggcgatggcggccatgctgttcccgcgcgcgataagctccatgacctccgtttcgcgcgtcgacaacccgtgcgcctcctgcagcatgagacattgcttcgacgtgcgatcgcggatgacgcccgcgtcttcggatgccgaagggcgattccgtcggcgctttgccgcaggtttcgccgccttctgctgccgcggctcctccggcgcgccgaccgccaggaactcgatgggatcggccgtcaccgtgcccttcgccgccagcgatttgaacagcgtgcccgtggccgccagcagcgtgaggcccagcacgtagctcgataccatggccacgatgaacaaccactcgcgaccgccgatccacatgaagtcgctcacccagcccagcaagaagccggcgctctgcatgatgtaggccacgccgccgaagaacccgtagatgaacaccgggttgatgccgcggtcgcgcgagatctgcgcgcactgcatcatcatgagcatctgcactagcgagaacaccatgtacgtaagcgccgcgaacaggttgagataggtcgcacccaaaaacggcagcagcaagaaccccgtgatgatgagcggatacaccacacggaacaccgaggtcagcccgaaccggaagctcatgcggtaccacagcaccaacagcaccaccgccgacaccaacgagcccagcatcgacgcgctgttcaccactgcgccgatatcctcgtgcagaagcgcgatgccgcggatgacgccgctggcgaacgcgagcgaccccacgcacagcgcactgcgccaatagtcggccaccacctgccgatacacgcgcggatgctgctgcggcacgtcctcgaacataggctggtccacgtgcatctcgcgcaccgaaagcgcgatgcaaaggccgcacaagggcacgaacacgagcggtatgaggaaagccgtcagcgcgatgggcacgaggtacagcgcaaagtagatgagcggcgcgatggccgtgcccacgatgagccgcaagttgccctcggccgacggcagcgacgcgaagtagcgctgccatagcatgaacatgcccgcgcacccgatgcccagcaacacgccaccggcgaacaccagcgggagcgtggccgcctgcacgtacatggccgcgataaggcaggccgacccggcgaacaccaacagcgcgctcagcgacaccagcatcacacgcgcgccgcgcggaaagtagtacgatccgagcatgctggctacgaacgcgccgccgaacgcgagcgcctgggctaggaagaacgtgagggtgatctccgccgtctggaattcgagcggcagaaacgggaagacaccgccccaaatggacgtggcgttcaccgtgagaaaacatgcgtagccccaactggacacatgcatgcgcgatgagctttgctccacgacccctcctatcccagcttgcacgacgcttcgcatggtagcatagccgtcggctccgaaacgggggattcagagaatagtgatgactcctacctggggttttgttcttaaatcacatgacgagtgtgattcccccgccagctgtttccggtactttggaacaggcgagaggaacaatcgaagcaagaggagggaaccatgaccatgaacgaatcgagcgtatcgcgccgcacgttcgtcaagggatcgctggccggcctggcgcttgccggcgctgccggatcgaccgcgctgtacggctgcgcgccgaaggacgagaagggcgccgcaagcgagggcgcgggcgcatcgaccgaccagatctcgtggagccagtgcaacgtcaactgcggcggcaactgcgtcttccagtggcactcccaggacggcaagatcgtctacatggagtccgacaacaccggcgacgtcgatctgcaggcacgcgcctgcctgcgcggccgctccatgcgtcgctggatcaacagccccgaccgcctgacgaagcccatgaagcgcgtcggcaagcgtggcgagggcaagttcgaggagatcagctgggacgaggccatcgacaccatcgccagcgagctgaagcgcgtcatcgacacgtacggcaacgacgccatctacgtgaactacgccaccggcatgtactccaccaccggcaagcagccgggcctgcgcctgctgggcctgctgggcggctacatcaaccaggcgtacgactactccacccacatgctgcaggtggcgctgcccttcatgtacggcagcaagtgcagcccgtacgacaacgtgcacgcttcctcgttctccgaggccgagcgcgcctccgaccttgtggtgatgttcggcaacagcccggcggaaacccgcatgggcggcgcgaacgccgtgtgggacttcgcgaaggtgcgcgagtccgtcaccggccgcggcggcaagatcgtcaacatcgactaccgcatgaacgagtcgtgctcgggacacccggacgagtggctgcccatccgtcccggcaccgacgccgcgctggcgtccgccatcgcgcacgagtggatcgcgaacgaccaggtggacaagggcttcctggacgagtactgcgtcggctacgacgaggacaccatgcccgagagcgccaagggccagaacaagtcctacaaggactacatcatgggcaccggctacgacatggtagagaagaccgccgagtgggccgcccccatcaccggcatcccggccgagcgcatcaagcagctggcagccgacatcgccgccgccgaggcgccgttcatctgccaaggctggggcccgcagcgccacacgaacggcgaggacacgtcgcgcgccatctgcatgctgcccgtgctcatcggcaagatcggcctgcccggcacgaacaccggccagcgcgaggccgaaccgcccacctatctcgtgggaagcctgccgttcgagaaccccatcaagacggccatcccggtgtaccagtggatcaacgccgtggaccacggcaaggagatgacggccaccaacgccggcatcgtgggcgccgacaagctgaacaacgacatcaagttcctgtggaactacgcgggcaactgcatcacgaaccagcacggcgacatcaactacacgcacgacgttttggcagacgagagcaagctggagttcatcctggtgtgggacaccgtgatgaccgactccgccaagtacgccgacattctgctgcccgacgccatgcgctccgagcagctgaacatgcagacgcagggctactccgaatactacaccgccgtcgtcgtgggcgggcccgcgcaggaagcgccgggcgagtgccgctccagctacgacgtatgcgccgacatcgccgacaagttcggcaagaaggacgcgttcaccgagggcaagacgcaggaagactggatcaaggagctctacgaggccggcgcgaaagccgacggcaacatgcccacctgggacgagatcaaggcccaaggcgtgtacaagcgtccgctggagccggccatcggcctggtggacttccgcaccgacccggtgaagaacccgctgtccacgccgtcgggcaagatcgagatctactccgagcagctggccgagatcgccgccacgtgggagctcgaagagggcgacgtcatcaaccccatccccgtgttcacgcccggcttccagggctacggctcggtgaccgacgagtacccgctgtactgcacgggcttccatcacaagagccgcacccactcctccttcggcttcatccccgagctggagcaggtggcgcgccagcagctgtggatcaaccccgccgacgccgagtcgcgcggcatcgccagcggcgacacggtggccgtgaagagccccgccggcgagatccgcatcgaggctttggtcacgtcgcgcatcatcccgggcaccatcggcatcccgcagggcgcgtggcacaaggccgacatgaacggcgaccgcgtggacgagggcgcgtgcgtcaacacgctgaccacgtaccgcccgacgccgcttgccaagggcaacggcccggcgcactccatcatcgcccagatcacgaaagcctaacggggggaggaccacatgactcagtacggatttttcttcgacagcacgcgctgcacgggttgccgcacctgcgagatggcgtgcaaggactacaaggacctgtccgccaccatcgcattccgcaaggtgtacgactacgagggcggcgcctggagcgacgcgggcgacggcaccttcacgtccgacgcgttcacctaccacgtgtcgctgggctgccagcactgcgcgatgccggcctgcatggccaagtgcccgcagggcgccatcgagaaggataccaagacgggcctggtgcacatcaaccaggaaaaatgcacgggcgtgggcgcctgcgtggagacgtgcccctacaacgtgcccatcgtggacaaggccctgggcaagggtgtgaaatgcgacggctgcgccgaccgcgtggccgagggcaagagccccatctgcgtggaggcctgcccgttgcgcgcgctggagttcggcgacatcgaggagctgagggcgaagcacgaaggaacggtggcaggcattgcgccgatgccgtcgcccgacgagacgacgccctccatcgcaatcctgccgtgcccggcggcgaaggagcccggcgacaccactggcgccatcgccaatgagaaggaagtgacgggcgtggcctaaccgccatccgctactcgaaggggcgccgcaggggcgccccttcgcatcttcgaacgaaggctcccttccccaaggacggggcttccccgcgcacggcgccgcccgaacggactccggggaatcgacgggccttcgtggtagaatcgtcttcgtcttccatcgtttccgaccgaaagcggcattatgccacggggcttcttttacgacaatacgcgctgcaccgggtgcagaacctgcgtcatagcgtgcaaggactaccatgaccacggaccggacatggccttccgcatggtcatcgactacgaaggcggctcctggcaacccgatgtcgacgggacgttctcgcaggacgcgttcgcctaccacgtgtccatctcgtgcaaccactgcaacaaccccgtgtgcacccgcgtatgccccaccggcgccatgcataaagacgagctcgggctggtctggcccgatgccaccaagtgcatcggctgcggctactgcaccatggcctgcccctaccacgcaccgcatatcgacgcgcgcctgaaacgcagcagcaagtgcgacggctgccgcgaccgcctcgtcgacggcgggcagcctgtctgcgtggaagcctgcccgctgcgcgcgctggagttcgggctgacgtccgagctgaccgaccgccaccccgacgcggtgcgctccatcctgccgctaccggacgaatcggccacgcgccccaacctcctcatcctgccgtcgcctgcggccgaacgagccgaaaagcagggaggcagcatcgtgaaccgaacggagcttcatctatgaccagcggattcgacgccttctcgctgggcctgttcacctcgctcgcaccggcgggcgtcgttgcgttcctggcactcgcgctcgtgcggctctggtcgcgcgaccgcacggcctcagtgcgcatcgaccgcatgatcgcgctgccgttcagcgtggttctgatcgggttcatcgcctcggctacgcacctcggaacgcccgcgaacgcgctgcacgtgttctcgggcgtcggccgctcgccgctgtccaacgaggttctgagcgctgtcgcgttccttttcctggtaggttcgtactggatgatggcgttcaaggagcgctttcccgatgccgtggcgaagccatggctggcgttggcctgtctggcaggaatcgcgcttatcgcgtgcacgtccatggcgtacaacgtggacacggttcctacctgggataccgcattcacgccggcgaacctcgtgttggcagcgttgctggcaggccctgtgttggggctcctgttcctggagctggcgcaggtgcggccgcgcgcgctcgagcgcgctctcgtcgtactggcggcgctcgcgctcgtggcggggaccgtcgtgctcgcactgcaccaggagagcctttccgccatcgcgaacaacgagttcgcagccagcacgctcgcgccttcctatcctgctgtcatcggcgcgcatctcatcgtaggcgcgatcgcactcgcgatagccggcctgtcgatgaagcgcgtccaatcccgccgcacgacactcgcgctgagagccaccgccagcctgctcgcgctcgcagccgtcttcgtcacccgcatcgtgttctaccacctgcacatgaccgtagggttttgatcgagcagttctcccgtgtggcaacacagcggccgttcgccgacttccctgattttggcaaaaatttcgaggtaagaagatgttagccaaggaatacttgcactataggatgccttgcccagctcgtttcgacaataatcccaggtcatgtttttccatacagcctgagccgtagagttagatgcagatgacatcttcctacctcgaaatttttgccaaaatccgactcgctaccgatactatcgctgcccgcgcaaacaaaaaccgactcccctgcgtacgaagaaacccttacgataggaaagttcagtcgcatacgtcaaacaccgcggggaagcggttcctaatgcccgccgccggccatcatcttcacggcgtgcggcagggctttcaccacgccgtcccagttctcgcgggcagccttctcgctgccgggcaggttgatcaccaggtgacggccgcgctgcatgcacagcgcgcgggacagcatggcgtacggcgtgatggccagcgaatgcgcgcgcatggcttcggctatgccgggcacgttgcgatcgcacgcgtccatcgtggcctcgggcgtcacgtcgcgcagcgagagcccgctgcctccgcaggtcagcaccacgtccacgtcctgctcgtcgcaggcgcgcacaatggccgacgcgatgaacggtcgctcgtcgggcaccaccacgtggctcttgcactcccaaccgttttcggcgatcagcgtctccagcgctgcgccggccgtatcctccttcatgccgcgcgtatccgagcacgtgataatggcgaaggtgatgttctgttccatcttacaaactcacttcctcggaaacgtcgagcaggacgcactgcacaagcgagccggcagtgcgagagtcgaggccttccggcaggatggccatgcagttgctgcgctggatgactccgaacaggcccgagctctggttcttggcgggcgccaccacgtattcgccctcatcgttcttgtacagcgtgccgcgcaggaagatgcggcgcgggtccttcttcttcacgtcgcgcgatagcttcgccatcaccgacgggcgctcgaaatgcgcatacccttgcatcttgcgcagcgcggggcggatgatcatctcgaagcccacgtacgccgccgccgggttgccgggcaggccgaacacgggcgtaccgcgcacgatgccgaacgtctgggccttgccgggacgaatgttcaccgtggtcatcagcagctcgcccaactcggacaccacgggcttgatgaagtcgaagtcgccgttcgacgccccgccgctggtcacgacgaagtcgtacgcgtccgccgccgcggacaccgccgccgcaagcgcctccttcgtatcctccacgatgggcaggatgacgggtaccgcacccgctgcttgcgcgcaggcggcaagcgcgtagctgttcgagttgcggatcttgccgggcgtgggcacgactgtgggatccaccagctcggagccgatggagatgacggccacgcgcggacgccgatgcgtcggcacctccacgatgccgcatcccgcgaggaacccgacgccggccgagccgatgacctcgcccttcgacaccaccgtctcgcccgccttcgcctcttccccggcctcgcgcacgttggagcgcacggcggtgggggcggagaacgccacgcggctgccgggcttgccgtcgccggtcaccacgtcgacgatctcgtatttcaccacggagtctgcgtcgtcgggcatgggcgcgccggtcatgatgcgcacgcactgcccggcctcgatagagccttcaaacacgtcgcccgccgcgatctcggccacgacgtccagttcgaccggcgcttcctgcgacgcctcggcaagctcggcggcccgaaccgcgaacccgtccatcgccgaatgggcgaacggcgagatgtcgatatcgctcttcaaatcggcggcggccacgcggccgaccgcttccaacacgggcacggtttccaccggcaggggcgccgcatgggacaacacgagcgcacgggcctcttcaagtgagatcatttctggcatggttgcacatccttttccttcgtgcggctcattatagcgcttgcagtatagtgttgcgcaggaagtttggcagcatcggcagtcgtacgcgggcttcaaggggggggcgctccacccaatcgccatgatctgacgatagcccctcgcccccaggttcgcgataatggaaggacaccgaaccctcgcacacaaggagacgcccatgacctcagaagaaacgcccctgtaccaccgcgtgaaagcccatcccaccgcccgcatcgcgccgtcggctggcatcgtgggcgacgtgaccatcggccgcgacgccagcgtgttcgccggcgtgcagatccgcggcgacgacgcgcccgtcgtcatcggcgacgagtccaacttgcaggagaacacggtcgtccacgtggatttcgacgtgccctgcatcgtggggccgcattgcaccgtaggccacggcaccatcctgcacgggtgcgagctgggcgaaaacgtgctggtgggcatgggctccatcgtgatgaaccgcgcgaagatcggcgcgaacagcctgatcggggcaggatcgctggtgacagagggcaaggagttcccgccgggcagcctcatcatgggcacgccggcgcgcgtgaagcgcgcgctgaccgacgaggagattgcgtccatgtgcaccttccccgccgacgactacgtgcgccaaagcggcgaaatgctggagcagggagtgctggagcaccccgcccccgacatggacatgcaccggggagcgtagggcaaagccttttcccgctcatgaagaagggctgcccaaaggcagcccttctcgtttcgcgaagctaaagagccgtcaagctctcgcaaccgttagcggttgatattgtaaaaggcgttcatgccggcgtactgggcggcggtgtccaactcttcctcgatgcggagcagctggttgtacttcgccacgcggtcgctgcggcagggcgcgcccgtcttgatctggccggtgttgcaagcgacggccagatcggcgatggtggtgtcctcggtctcgccggagcggtggctcatgacgcatgcatagccggcctgcttcgccatctcaatggcctccagcgtctcggtcaggctgccgatctggttcaccttgatgaggatggcgttcgcgcagcccagctcgatacccttggccaggcgcttggagttggtgacgaacaggtcgtcgcccaccagctgcacgcggtcgccgatgcggtcggtcagctctttccagccgtcccaatcctcttcggccataccgtcctcgatggagacgatggggtacttgttcacgagcgcttcccaatagtccaccatctcggcgctggtcagctcgcggccctcgcccgccagcacgtacttcttcttatcggcgtcgtagaactcggtggatgccgggtccatggcgaacatgatgtccacgccgggcttgtaaccggcagcttcgcacgccttcgtcacgtactcgagcggctcttcgttcgtcttgaagttgggggcgaagccaccctcgtcacccacgccgccgccgaggcccgcgtcatgcagcaccttcttcagcgtgtggtagatctcggcgcaccagcgcagcgcctcggcaaacgtgctcgcgcccaccggcatgatcatgaactcctggaagtccacgttgttgtcagcatgcacgccgccgttgaggatgttcatcatgggcgtgggcagcaggtgcgcgttcgcgccgccgacgtacttgtacagcggcagctcagccgactcagcagcagccttggcgcaggccagcgacgcgccgaggatggcgttcgcgcccaaggcacccttgttgtcggtgccgtccacctgcagcatgatgtcgtcgatgaagcgctgatcgtcggcctcgatgccgatgagcgcctcggcgatctcctcgttcacgtgggcgacagcatccagtgtgcccttgccgagatagcggcccttgtcgcagtcgcgcagctcgacggcctcgaacgcgcccgtcgaagcgcccgacggcaccgcggcacggccgaacgcgccgtcttccagcaccacttcaacttccacggtcgggttgccgcgcgagtccagaatctcgcgaccgaacacatcgatgatgacgctcatgcatgcctcctagtaggttttcccgctttgccgcatcgccacggcaaagatgcacttcgcggtaatcatagcacgtcggaagcgcagcgttcgtccctttggccgttttcccgccattgtcgacaagcggtcgagagggcgaaacgcgagccctaccccaacgctatatcgtcgccatcgtccacaagatgttcacgctcggctacgattcgatcgatgagttcttgttgagagtgcacatccaacttgcgatagatggcgcgtacgtgggttttcaccgtatcgggcgacacggtgagttcttcgcagatggcacgccgcgtcttcccctgagcaagcagcagcatcacctcggtctctcgctgcgtcaccgcacgctcggtagccacgaaccgcacgatccctgcgagatcgccagcttcaagaccgccttcgcccggcagcaccgtgccccaaccgtacttcaaattgcgaccgctcgacaggaacagcgcacaggcgaacaggaagcacgcggcgaagctggcgaggatagccgcttccccgtagggacgtccgcccaacaccacgtaagccaccgcgccgcccacgagaacgccggaaaacagcgccgcacccggacagctggcaacccacgtggctggaagccccatgttcttcatgaggcaggcgcccaagctccacagcaccaaatcgaggtagcagaacccggcgaccaacgtcacgaaacccagctgcggcaaccctggcgccatcgcagccagcaagaaccccacagctacgaacgaaaacgccaccttgtagatgaaccggttgaaatcgagcctcaggaacacgagcgtggcgaacaacagcaccacagctgcgagctgcccgatcgccatatgcgaggagccggaagcagggacaccgaacaggaacaggctggcgtagaacacgccggcggcgatgccctgcaccgccgaggtggccacgaacttggcaggaaacggcaggggcacgtcgcgtccatgctggaaataacgcactcgcggaaagccgtgcacgacacggcgcagaagcagaaacgccgcgaacggtaacgcgagcgcgacgccgtacagcacaagcggcgcttgagtcgcttcggccaagcaggagaagcacgccgtcatcagcacgagggccgccagcgttcccaacatgccctgatacagcgtctgctgcgtgcctatccatccgaacacgcgatcgatctccacgcggaacagagcagccccgacgcctgtcagcgcgctcatcaccgcatacaaagcggcatcggcggcaccgggcagcgaccggtcgagcgcccacaccaagtgaagcgccgccgcaagcgtcatgatcgaagcgatcgccaccaaccacgacggactgtccggcacgctgcgcgtgcgtttgaaccagatggcaatcaccgcacttgccatggccatccccagcagcgaacccgcccatgccggcatagccaccatcgctccgccgcccaacggcatcgtcacctcgggacccatgcagcacgcaaccatccaaaccatatagcatgcgctcgtcagcgcaatgcgccctcgacccgccgcagactgaagcacgcccgcgacgacgccgcgccgttcgctcggtgcgttaaaaagattgcgaacatgttcgttcggcatatccctccccttttctccctaaaaccaggataccgcgtcgcacctcacccctcggggtgaaaacccgcgatgcggcttttttccctgcggcgggcgacgaaagcgctgtccggcgcatgatacggtacggtcatcgcccggtgcggagggcacgggcaggcggcatcggtattgcgcgggccgccgatcgtcaagggaggaagggatcgacatgacgcaggaaagcattcccagcatggatcgacgcagtttcttgaaaggagccttcgccacaagcgccgtggctaccgccgccgtcgctggcgtaggtacgctagcaggatgcgccgcgcaaccgaaggagggcacggcgggcgcctccaaagccagcgcgaagggcacggcaggtacgtacgaattcgaaaccgcacccgagcctatcgccgacagcgatatcaaagagacggtcgatgccgacgtcgtaatcgtcggcgcgggcttctcaggcctatgttgcgcgttgtctgccgcggagaacggcttgaacgtcgtgatgctcgagcgcatggatcatgtggtgggacgcggcggttccatctacgccatgaactcaaagctgacgaaggagaagggctacgagtgctcagtggaagagatcgctcgacgctacaagcgcatgatgggataccactcctaccgggtggatggccgcaagtggatgctgcacttcaaccgttcaggagaagccatggactggctcatcgaccgcatgaccacggcaagctccgtgggcggcagcgacctcacccctgtcatggagcactggtacgaggacccggaggagatcaacggcgaattccccggtacgcacgaatttttggacggcccgaacggcaaaggtcccgacgacaacccgcaacaggacgtatgcgacaacatggcggcgtactgcgcaaaggaaggcgtagacatccgctaccagaccgaggcgaagcagctggtgaaggacggcgacaaggtcgtgggcgtcgtggcgaaaaccggcgacggctacacccgcttcaatgccaagaaaggcgtagtcatggctacgggcgacttcggccaagacaaggacatgctggaaaagttcatcccctgggcagcgcaccaaacagacttcggcggcatctgggacggctcaggccacaagatggcgtactgggccggcgcggccgtggacaagaacgagacgcccacgcccatgatcttctgcttccaatggcgctccatcacccgccaggtgcgcgcgttccaaggcctcatggtgaactccgacggccgccgctacgataacgaggacaacgttatatcgcacggagccctagcgttaacccacgagaagggccactacgcatatgccatctgggacgatgattatgcgaacgagccgcagtggcagaaccaccgctacgtggacggccccaaagtgttcgagacgcccgacgacgtgcgcgcctactggcagaccaccatcgacggtcctggaaccatcaacatgaacggctcgggcgacatcgaggtgaagatgatcaaagccgacaccatcgagaagctggtagaggagttgggtctgccgaaggaggagacgctcaaaaccattgaggcttacaacggatactgcgacaagggagtcgacgaagagttcggcaagcgcaaagaattgctgctccctgtcaagaacggcccgttctacggaatcaaatgcacgccttggttcctcacaactaccggcggcatccgctgcaacgacgacatgcaggtgatggacgaggacaacgaggtcatcgagggtctgtactgcctcggatccaccgtcggcgacatgtactgcaactgctactccacgcacttccccggccataacctgggcggcacgtgcctcaccttcggctacgttaccggccgcaagctggctggcgccgaatagcttcgccttttcccgtcgcagcccggacgccctccctccgcgtccgggctgcacgttgtttcggcgcgttaggaccggaagacggcgccccccatcgaagccgccggacgtctctacgccgtcaagcctcctgagctccgggcaggcacgcgcggatgagcgatgcgatcagacaaccacgcataccgtgaaaattccccgatcttcaacatgacgccctccctcttcaacgcgctagcccgatcacgaagcccagagaaggtgcgcggcgtacccgtacgagatgatgccccccacctccgtctcgcgccagcctcgctcgccatgggagaactcggataacgccgacgttgaagcgaagccgttggcgaacgagcataccgcgtcgagcaggctcaggtcggatgcagaaaaacaggtgggatcctccgcgcgtcccgcaacgatcacctggccgtcgccctgttcgcgcaatgcgagcgcctcgtcgtcgacgagaccggcaaccagcagctcgaaccggtcgggaaccggaccgaacggcgccttcgcatagcgcagacccgtgaacccctccccgctgtcgcggtaggcggcgaaatccaggtagaacagcaccttgttcagcttcgtacgatacagatcgcgaacatgccgggcaaggtagaccacggtctcgcgcatgcgatccgaatcgaacgcgcgcatgcccgtatccagcgtcttttccttcgcgatctcgtccagcacgttgagccgaaccaccgcgtagtcgacccgggagagaccgcgcttccgcaccgtatcgcacgctttggcgcgctcttcgtcagaaagcttacgtgctccccgttccaggcacttcagcaagaagcgcggatcgcgcgcgttggctagcagctgcgcatgggaatcggaagcgaggctcccgctttcgtatcgttgcaagctcgcaattccgatatcgagagcagcggcaaacacccgctgcgaaaacccgtacttcttacgcaaggccacgatttcctcgggctgcatgatgcccatcttttcgcgatacgctcgatacagtttgtcgaaaccttcatcgacgagaggagcccatccgatggaatttccgcatttcggacatatcaaatgctcgatatccacctcaaccgtcacgcctcggacatcctcaacatgatgccgagtctcatatgtcgcatcgacctcttcccagcattcttcgcacaacagccgtttcacggtcatccggatcaactcgctttcctatagggatagacgagcggccattcagcctcatggaacgagacgcagactgcctgcacatcgtccgctttaagatatgcagttagttttatatatacttcgtattcttcaaggtatctgccaaacacccacagatcacgcggccgtcctttgtcgtcttgcaaggggccgcttgaatagtcagcgacttcaagatctcgaacagctcgatgcacatcagcttcacgatagccaatggccttcataaaagcacgcgtcttatttctcggatctccagaccctacaacacgaaagcattcaaagcgcgctcgccgcaccagcgccagcaccgcttcgatcttccagcgttctgcaaccgtccccatcgctcaccccgcatcacatcatttgatgtgatcagtataccatgaaaacatgccgaatgacatcaaatgatgcgattgcactactacagccacacggccagaacgacgcatgccagcaagcccaccgccagcacgaggccgctgcgccccgagaacgcgcgcggcgcaagcgaggtgcgctcgacatcaggggcgccgtagcagcgcgcgtccatggcgacagccagcgaatcggcacgccggaacaacccgacaaacaggggaatcagcaccgtctgccacgcgcgcagccgttcccacaggctgccctcggcaaacgaagcacctcgcgcccattgggcgtcgtgcacgcgaccgaactcctcggccgtcaccggaatgaaccgcagcgccaacgagaacaccatggcgatgtcgtcggtgggaacgcccaaacgcttgagcggcctcaggaagaagcccagcgcgtcggtcagctcggtggaagtcgtcgtgtacgtgaccgcaaggctggccaccaccagcagcacgatgcgcaccgcgaagaaaaggccgcgcgcaagccctgccggcaccagcccgaacgacccgatcagcgccaccggctcccatgcggcgagcactcccgccgacacatcgcccaaggccggcggagccgcgctcgcagcctgccccacgtcaagcgagaacccgttgaacagcacggtgaacgccacgatcacgtacaccggcacgagcaaaccgaagaaccgccgcgccggaatgcgcgacaccttcgccaccgtgacgaacagcaaagcgcacagccctaagcccatccaagaacgcaccaaaaacagcgtgacggaatacgccgctagcagcacgattttcacgcgtgcgtcacacgcgtgcacagcagaggttccggggatgtacgaactgacgttgatacgcatgctggcagtatgccacaacggcgtttcccgcgcgacgaccagggtgacaattccgcgcgatcagcgcgtcggctcccccttcgcctgcccgggccgcggcctgtcttcccggtagagcgcaagcagcgccaaccccacgagcgagcaaatccccaccagcagaaacgcaccgcgaaagccttcgtcgaccgtgctctggaacgtgctttctatgtcgcctgcccgatcgtcgatggcggcgaggtactgttgctccgccgcgtcgacggcttcggccggcatgcccgccgaagcagcttcctgttcgatctcggtttttgccagcgtcttcacgttcgcgacgatcgtggtcacatccgaccccttcatcagctgttgaagatcgtcgggcaacccagcgccatcgcctccctgcgcttgcccgctcgctagctgcgcaatcgattgcccgcccggcgcatcgggcagaacgcccatgatgcgatcgggaatggccatgcccgcatgcgcgatgaacgcaaccagcacggcaggcgcgaccgccgtgcccaccgagcgcaccagcgacagcgtcgccagcgccgagttcgcctcgcgctccttcgtcttcgccagcatcatgtagttgagcggcgttccaatcgtgaagcccatcccgatgccgatggccacgaggctgatgatgagcgtcgccatattcgcgaactgcgtggccaccagcgccaggaacatcgctcccgcagccgaagccgccagcccgaacgcgagcaccgccttcacgccgaagcgatcgatgagcttgcccgacaccggcgctcccaccccggcgaacgccgccagcacgatgactacgtagccgccgctgcccgagggcagtttcagcacgttctcggcgaactgcgggatgaagatgatgcccatcaggatgacgccggtgatcaccgacagcaccaacgtgatcacgatgtcgcggtcgcggaagtacgacaggttgagcaccgggtcggccgcgcggcgctcgatcagcacgaacaccggaagcagcacgacgaacgcgagcaagaacggccacacgtcagacgaggtcgcagatgctcccagatcgaagaaatcgaggttcttcagtccgtacagcagcgacaacaccatcgccaccagcactgcaatgccccacccgtcgatgggcttcacctgctcggctcgcgtgttcggcagcacgaacagccccgccaccacgatgaaggcgcagatgggaacgttcacgtagaagatgaactgccagttggcctgcccgaacaccgataggatcaggctgccggccgacgctccgaagatgttggcaatgccgtacacgccgcctaccagacccaacgccagcccgcgcttctcgggaggaaacgtcgtgccgaactcggccgtggcaacaggcacgatgccgcctccgcccaccgcctgcacggcgcgcgcggctaacagcatccaaaagctccccacgtcctgcgccaacccgcatagaagcgacccgacaccgaacagcaggatgctcgcaaggtacacgtacttgcgtcccgaacggtccgccagcttgcccatcaccggaatggcggccgcgtaggcaagcgtatagatggtgatgatccacacgcccatctgctcgccgatgcccagatcgctctggatgaccgtgcgggcaggcgtgacgatgccggtatcgagcgccccgatgaacaggcccagcagatacacggccgcaacaagcgcgaaccccttgccgcgtccgcgcgaggcggacgaagcagatgaggaagaagacggagccatggcacgacctttcaagagtgaatcaaccggcaagaaaaagcccgcggcgctggccacgggcttcggaggatgccgggcgcgctcgtttccaagtgcgcccggggcgaggacgaaagcagcgtaagagcgctttcgccctcgccgctgacggtcgagcgcgtgagcgcctagcggccttcgcgaatgttctcgacaccctgctttacgttgtccttggcatcgacggcggcatctttgatagcctcgccggccttgccgatggactctttgacggactccatgaatccttcgcccttctcatccttgcgctgctcgtgctgctgcgcgcgcatagcggccgcggggtcgcccgtgcgctgcgcttcctcgtgctcgcgcttcgcggcggcatcctcggccttgcgctcgttcatgccggccttggcctcgtggtaggcatccttcatgttgttcttcacgtcgtggcccatatccttcgcgccgttcttcatatcgacggacgcgtcgcccgtcttgtaagcccgatcaaccatgatagttcctttcagatagaggtatcgttttcgtgctacgcttcgtcggcttcgccggtggtcttgataagcagctcttccgtctcggcttcggcgcgatcgaaatcgaacgccgtagccgccgcctccacggattccttctcgttgccatcgccgtcgacggcctcgacgtactgctcggcctcgcgcttcacttcgttttcgatgcgctcgaggtcttcggccgcctcccgattgagctcgtcggcatcatccttgtcgatgcggacgtcttccttcgtggtcgtgccatccatgtcggctcctttccatttgcacggcgcgaagcaccgcgctttgcgtgctgagttcataccccgattgtactgaggaagccctgcgcgcacgaccaccgcagcgctacggtactgaaacggctgcgcgacagcgcatggatgagacattaaccctgtccctttgtctcattttcatcctctgaaaagcagaacggggacccgcaggtccccgttcggaaaagcaatctgaaaagaaaaggctacttagcagcctcttcctccttggcatcggccgtctcgacctcggcggcttccgcgttctcggcggcagcctcttcggccttctcggcaacctcgacggcggcttcctcggccttggcctcggcggcctcctccttcggagcctcctccgcagcctcgaccttcttcggagcggccttcttcgtcgccttcttggcagcgggcttcggctcttccttcttcttcacgggctcggtcacgagctccatgataaccatgggagcgttgtcgcccttgcggttgcccagcttcatgatgcgggtgtagccgccctggcggtcggcgaacatgccctgctcgaccttctcgaagatctcgcgcacgagttctttgtcgcccagagccgcgatggccagacgacgggaatgcaggtcgcccttcttggcccacgtgatgatcttatccacgttcggacggatctccttggcgcgggactcgaccgtcttgatacggtcgttcaggaacagggcgttcaccaagctcttcttcatggccttggtgtggctgaagtcggtgcccagcttgcggcccttgtagttgtgtcgcatgattcgtatctcctatagcttcaaattgaggtccatggaaatgagcttgtccttcacttcttcaatggacttcgcaccaaagtttctgatgttcagcaggtcgttttcggagaactcaacgagctggcgcaccgagtggattccggcacgcttcaggcagttgtacgagcggacggacaggtcgagatcctcgatctgcttgtccagctcggcgttggactcctggccctccggcgcgaagatggacgggatttcgccctcctcctcgtcgacaacgtcggacaggctcaaaaacgcgcccatgtactggttgatgatgttggacgcgcggcacacggcctcggtgggcgtgatgctgccgtcagtctcaacttccagcacgagcttgtcgtagtcggtgcgctgacccacgcgggtgtcggtgacgttgagcgtgcagcggcgaaccggcgagaacagcgagtccacatggatgaccccgatgggatcctccgtgcgcttgttgcgctcggccgacacgtaaccgcggcccacgccgatgcgaaccgtcatgtccagctgaccgccgtcggcgaccgtagcgatgacgtgctccgggttgaccagcgtgaactcggtgggaatgtcgagatcggcacccgtcaccgtgcaaggaccctccgccgacacatgcgccgtggcttcctcgatatcatcgttcagtgcggagaacacaagacccttgacattcaggacgatatcggtgatatcctcgatgacgccttcggccgtcgtgaactcatgctgcacaccctcgatctggatggcggtggctttcgcaccatccagcgaggagagcagaacgcggcgcatgcagttgcccagcgtgtagccgtagccacgctcgagcggctcgactatgaaacgtgcgacagtgtcgttgacttcttccgttgttaccgtaggcctcatgaactctgtcatgtgggataagcctccttactatgccgcgattatttcgagtaaagttcgacgatgagctgctcgcgaatgtccagatcgatttgatcgcgctgcggaagagcaagtacactaccctgaagtttctcgatgtccacctcgagccatgcgggcacctgaacacgctcgttggagatgagcgcgctcttgatgaccagcaggtcggcagccttcggagcgacggccacgaggtcgcccggcttgacgcggaacgacgggatgtcgacgcgacggccgttcacggtgatatggccgtgacgcacctgctgacgagcctcggcgcgagacttcgcgaaaccgagacggtacacgacgttgtcgagacggctctccaggatacgcagcaggttctcgcccgtcacgcccttctggcggttagccatatcgtagtaatgacggaactgcttctccaggacgccgtagatgcgcttggtcttctgcttctcgcgcagctggttgcgatattcgctttccttgatgcgcttcttgccggcctcgcccggcgcgtagttgcggcgctcgatcgcgcacttctccgtgtagcagcgatcgcccttaaggaaaagcttcgccccttcacgacggcacagacggcagtccgctccagtataacgagccataattcttagatcctttcagttacacgcgacgacgcttgcgcggacggcaaccgttgtgcggaatgggtgtgcaatcctggatgctggcgatctcgaggccggcggcctgcagagagcggatggccgtttcgcgacccgagcccgggcccttcacgaacacggaaaccttgcgcaggccatgctccatagccgtcttcgcagcggcctcggcggccatctgcgcagcgaacggcgtggacttgcgcgaacccttgaaaccgaccgtgccggcggactgccaggagatcacattgccctgaggatcagtgatgctcacgatcgtgttgttgaacgtagacttaatatgcgcagcgccgacggcgatgttcttacgctcggagcgcttgatgcgcgtgcgcacgtttttcttagctgccacttgagactacctcactttttctttccgccgatttgcttacgaggacccttgcgcgtgcgcgcattcgtgtgcgtgcgctgtccgcgaacgggcaggccgcgacgatgacggagtccacgatagcagccgatctccatgaggcgcttgacgttctgggaaacctcgcggtgcaggtcgccctccaccttgatgttcgcctgaatgtagtcgcgcagcttggtaaggtcatcctccgtgaggtccttcacgcggacgctgggatcgacgccggtttcagcgaggatcttcttggaggtcgtcagaccgatgccgtagatgtaggtcaagccgacttcaatgcgcttgtcgcgaggaaggtcgacaccaacaagacgtgccataggttatatctcctctttcttcctagccctgacgctgcttatggcgggggttctcgcaaatgacgagcaccttgccatggcgtcggatgattttgcacttgtcgcacattttcttgaccgaaggacgtaccttcataatcatttcctttcggttaatgcgttctcgtatctatatgtcacacccagccgctggtgatagctttcctctttttgctgcttgcgcaaggcgcgcaagcccctcttcgcacacaaattctgcacaggttgacacgacctgcacgcttttacggtgctatttgaaccggtacgtgatgcgtccgcggttcaagtcgtagacggacagctcgaccgtcaccttgtctcccggcaggatcttgatgtaatgcatacgcatcttgccagaaatatgggccaatatcttgtgcccgttttcgagctccaccctaaacatagcgtttggcagcgcttcgaggacggtcccctcgagctcgataacatcttctttggtcaaaagtgctcctttaagcatatcgtcgttaagcagcaaccatagatgataccaaaagtattcggttatgtacacgagaatttgaggacgcagaattccaacaaaccttctggtccgaatgctacctgcttgccaggcgtgcggtcgtgccgcgcagcccgcgtctcagaaacggggccgccaggtattcgcgcgaagcgcagccgccttgtcggcttcgacgcagatcgtgcgcactgaggcgcccgcgtcttcggtatcgttctattctaggctattacgccgaagggtcaagagcgattttggtcggagttggaaaggttgccttcctgttcctccagcaacgaagccagcttgcggtacgatacgatggctacgacggagttcgccagcgccttgaccacgttgaacggcagcaatgccggcaacaccagcgaagcaacctgttcgtaggtggcgcccatgtacagcggcgtgaccacgaagttcaggcaaatggaaaccgccgaggacaccaccacgccggcagcgcatcccagcacggcgtgcatcaggcacggtttccgacggtacacggtccccaccacaaggataagcgacacggtggccataatgttcatgaacgcgccgagcggatcggtgacgaggtgcggtatccatgacgtcacggccacggccacgccgatccaagatccgtacaagatcgtagccagcagcgagacgatgcccgatggatcgtacttcaaccattcggccccgggcaccaccggcagctcgacgaagctgagcaccatagccatgaggatgagcagcacgatggcggcgacttgcttcggcgaacgctcctgccatccgtagggcaaactctccgcgaccataacacctccttagttcgcacattatacgctgcgagccactttgcgaccttgcggtcaagcgacaaaacgagccggctggaaaacaaccggctcgcttggggacaaatacgataggcgaaacgctcgcctacgccgtcttagcagccgcaacggcggtgtcgacgtagccggcggtatcgacgagcgtggcgcccgaaaccgcgtccgggcccttcgccttcacgtcggcgatcttctgtccggccacaaaggactcgatagccgacatggattcgatccacggcgtagtggactgggccttttccttcatgctggcgctgtacatatcggagttcaccgacttggacatgagcgccttgccctcggcgtacccttcggcgaaggcggcgtccgaattgggcacgggcaccaggccggcagacgaagcgtcggcgaactggaactcgtcgatgctcgaagcaaccaacacgtccccctgcacaagggaaacggcttccgcgaacgccttgtcaccgtgagcagccgcggtggcgcatcccatcttgaggtcggaaccgtcgccggcatacgcacccgtcgtggtgatgtcgtcgctcccggcgacctcggacacgagcttcagatagttgggcgcgtccacgagggtggctcccgtcacggcatcgaggctcgtcttcgtcagatcggaggccttcttgcccacgcagtacgcctctatcgccttcatcgacgtcaaccacggcgtggtggactgggctttctccttcatgctggccgaataggcatcgttgttcaccgtcttcgacatgagcaccttgccctcggcgtacccgtccgcaaatccagcgtcggagttcggcacgggcgtgatgcccgccgaatcagcaggcatgaactgatagtcatccacgctggcggcgaggatggtaccgtcttgggccgtggcgacaaccacgctcgtaaagcacttgtctccgtgagcggcgccgtagccgcgatgcaaggtcgcagttttggcagcggtgtcgggcgcggttgcaactgcagaatcagctttcgctgcagcatcgccgcctgcgcacgagctgagcgtagcagcaccggccgcgcccaatgcgaccacgatgcttcccttaagaaaatcacgacgcgagacgttcgtttccataatggcctcccttgaattccctctagacaacggggcaaaccatacggatcaacacgaagcaaatccatcgtcaaaacgcaggaaattgcattccgtccgagattgcgcttctaaacgaaaagggggagaagccctaaacgcccttgtcgggcccgtcgccttcatcatcgagcaacttgaacagctcctcgcgcgacgagaccccgagcttgcggtagatgttcttgcggtggcttcgcaccgtggattccgccaccgtcaactcatcggcgacgaagcttgacgtgtggccgcgacccagcagaagcagtatttcggcctcgcgcgcagtcaggcggtactcgtcggacagatcggcgcaacgacggttgtagccctcctgagctccgagcgcgttcgactctacggcatcgatgccctcgagcataacgcgccacaatcgcgagctgggagtgaccatgagcgcgatcgccatcaccacgaacagcacgatcagcacctggtactggcatgcagctagcacgcccgtgttcatgttggcgtccgacagcaggcacaccaggcacccgacgatgatcatgatgcctccggccggcagagcgagcgagcgcatgcgacccgccatcgctaccagcatcgccgacatcacgagcgcatagatggcgcagaacgagagagagccaaccgccatcaccgagcgttgcaacggaggttcgacgaacgccgtggccgcgaacaccgcgaaggccaccagcggcaggaagaaacggtacgagaagttgatgagcgcctgatcggtcttcatgcgaatgaggggcaccatgaccgccacggccagcacgcccgccaaagccagcggagcgacaccccaatccatggttcgcaccaggctattgtcagccacgaacagcaacagcatggcgaacggcataacggcgaagaacagcgcgcgagcgagtggggttttgaaatcacccgtcccctccaccaccgacacatcgaggtgcccgaacacgtcccgccagttcacccctgcctgcgccgaacgctcgtcctctccctctgagcggaagaacaaccgcgcgcaccctacgacggacagcgccgccgccacggtgagcaccgtccgggcaggcgtcgcgcccagcatgggcagcagcgacgcgcttgcgaacaggacgcagccggcgacccacgccacaacgagcgcgcgcctgaactcgagcacatgcagccggctcatccacaccaggcacatcacggcagcgccgaaacccatcatgagaccgctgcccgcttccacgacggagccgtcgagcgcgccgaagctccacaggtcaagcaggccgtagccgatcgcatagcacgccaacgccagcagcatgatagtgcggctcacacgcgcatgcgccgttttcagcaggcagatgaacaaaaacgcgagcgccgtgaacatggccgccagcgacaacgcggccgaaaacgacaccgaaggcagaaacgaccaggaaacggcaaccgacgacgtcatgccgcgccactgctccagcacggggaggaacaacggcacgctcatgcagaatgcgaaaaaggaaagcgtgtcaagcaggtcgaaccgtttgataatgcctcgtttttcgagtcgtatcatgttccttctctccaccgtccgcacgtcccgatcgcccgctgcgccgctcatgcacactgccctccctcaaacgcccgtagaaagtatactgtcttagtagcgtatttgcgaatgtaatgtacttggaggcaatggcatggtttctcggaatttcttccgcttcaacaccacgaacatcatcagcgcagaaaccgacaacgaggacatcctcgacgaagcggtggaatggtgcgaccgctacgagctgctgttctcgcgcgtagaccctgcaagcgagctgttccggctgaacagcgccgaggggcgccccaccgcggtggatgccgagctagccgcgttcatcgagacggcgctgtcgtactgccgcgaagtcgacgggttattcgacgtgactatgggaagcgccacgcagctgtggaacttcaaggattgcatgattcccgcgcgcgatgacgtggccgcggcgctgcggcacgtggattatcgcggcgtcatcgtgaacgatgccgtcgtgacgctgcgcgacccgctggcctgcgtcgatttgggcggcatcgcgaaaggctacatcgccgacggcatcctcgcgctgctgcgcgaacgcggcgtggaacacgcgctggtcaacctcggcggcaacgtggccgtcatgggcggcaagcccgatggagcaccgtggcgcgtgggcgtccgccgtccccttccctccagctcgatgccgctgcttgattcgttcgccgtcctggccctgcgcgatggctcggccgtgacaagcggcatctacgagcgcgccttcgagcaggacgggaaactgtaccaccatatccttgacccgcgcacgggcttccccgccgaaaccgacctgctgagcgccacggtggtcgcgcagagctcgctcgatgccgacgggtacaccaccgcgcttatcatgatgggagccgatcgcgcacttgcgttcgccgagcagcatccggcgctcgaagccgtgctagtcaccaccgagggcgatgtgctggccacctccggcatcggtgatcgcgtactgttcgagctgctgggatagcaaaacacggcacgcatgcgaaaagcgcgcaaagtggctgggccaccaggattcgaacctggatagctggtaccaaaaaccagagtcctgccgttggacgatggcccagtctgaaacagaagcgcccgcgatgcggcgcgctaagaacaatcgcatgccgagcaaacaaaaatggtgggccgtgagggagtcgaacccgcgaccttgggattaaaagtcccctgctctaccagctgagctaacggcccacgttcgcagcaatgcgcgagtactcattttagctgggcgggcaaggcgggtcaatgattatgttgacgaacaccagtcatacatctaaccgcacgcaataccgtctatccattgccaccataccgttattcaaaccgaaacaattcgtactacaatcgaagaggaaccgaacgcccacccctctgtagaaaggccgtgatgcctcatgtggtgctccaaggtcctggttgcctacgacggctccgctccctccgccaaagcgctccatctagcgcgttccatcggcgcgcaggacgagagcgtcgagctcgtgttcgcccatgtggtgaagctgtacggcctgggcaccggcgccgaaaccgtgctgctcgacgaggcgaagaaggtgctggtcgaaatggagcagcttgcagacgaagtgccgaacaaggcgcacgcccacctgctgaagggcagctcgccggccgatctcctgctgaaatgcgcgcaagacgagggctgcgacctcatcgtcatgggcagccgcggccagggcggcgtcaaaggcttccttggcagcgtcagctacgccgtggtgcagggatcgcctatcgccgtgctcatcgcgaaggacgctcccgccgcagcgacgaaagccggggcgaccgattagcatgcctgcaattgcacgagaaaagctctggacgagagatttcgtattcggaaccgccgtgaacttcctgatcatggtgaactactacgggctcatggtggtcgtagccgactacgccatgaaaacctacgatgcgcccgcagccaccgccggcctcgcggccagtatcttcgtcatcggcgcgctgatagcccgcctcttcagcgggcgcatcatggatcgcgtcggtcgcaagcgcttgcttatcatcggtgccgtgctcgaagtggcgttctcggcgctttaccttaccggcctgggattatggctgctgttcgcgctgcgcctgctgcacggcatcgcgttcggcacgtgttccaccgccatcggcaccatcgtcacggctcttgtgccggacaaccgcaaaggtgaaggcgtgggctactatatgctgtccgtcaccctcggcgcggcaatcgggccgtttctgggcatgtttctcacgcagaacgccggattccaaacgttgttcctcgtagccgccgccgtagctctggcttgcttgctagccgccacgcagctgcgcgtgccgaaaaaccctgtatcggccgaaaccgtggcccggaaggcgagcgacatcgcccgcgacgaacgcatcgagcaggcgggcgggttccgcgtgcctcgtccgagcctgacgaactacctggaatccagcgtgatccccatcggcgccgtatgcgcgctgctgttcttctgctattccagcctgcttgcgttcctcacgccgttcgcggccgaaaacgggctcgaaacgcccgcgagcttcttcttcgtcgtgtacgccatcgccacgttcgtcacacggccgttcaccggcaagctgttcgaccgcaaaggcgaccgcgtggtcatggtgcccgcgttcatcgccttcatcgtcggcatgggactgctggccaccgtctaccagccgacggccatgctgatcgcggcagcgttgctgggcttcggcgtagggacggttcaggcaagcggcctggctctggcggtgcgcctcgcccccgacgatcgactaagtctggcgaactccacattctacatcctgctggacatcggcgttggcgtaggcccgctgcttttgggcatcgtacagccactgtggggctatcgcggcctgttcgaggccatgtcgctagtcgccatcgtggcgctggcagcctacctgctagtgagccgcaaaaagggcgccatgcgccacaagcttgaggaagcggagaaacggtaaacagccggcatgccgctcaaagaggcaaaggaaaggcttgacgacccgctctgacccatgctccgctatcgatcgtcggcctcctccaccagatcgatgagctcctgctgcgaatgaacccccagcttgccgtagatgttcgccacgtgcgtcttcaccgtgttgcgcgacagcacgagcctctcctggatgaacggcccgttgcgcccgtgcgccagcagctcgagcagctcggtctcgcgcggcgtcagccggtaccgcgcggccacggcggcgcttttctccggcagccccaccgaggccgccgccgcgacgggctcaaccgactgcacgccatcgatggttgcctggaagccgaacggcttgagcaccgtgaagttcatcgccacgaacaggaacagcaccaccgcgatgcccaccgacaccgtcagcgggtcgggagtggcgttcaccgcatgccccaccgtcgcgccgcacagcaggcccgccgacgaggccgcgcgtccccacgcgaacacggccagcgcgttcaccttgttgcgcgcgccgatggaggccagcacgaaccacatgagcgcatcgaagcactcgctgcccgcgtacagcagcccgttcgcgaacgccatgtcgccgggcgcgcggcccacgagcaccaccaccgcgaggaatccgcccaccacgaacagcgctgcggcctggtacaacacatccgctttcggcaccttcggcagcagggccatgaccaagaggatggcgatgggcatcaagccgaagaacgtctgctggggattaccgtcgatcgagccgaacgtcaacgcgaacccgtacgcgatgcggaagatgaagatggccacgaacagcccgtgcgcgaacggcacgaacgacgcaggctgcgtgatggacgtctccgccggcggcaccgcctcgcggatgacggcgagcatgtcgagcgccagcgggcggcacgcggcgtacatgatgaacggcagcaggaacagcgtggccatgctcaccgtcgcgtcggcgcccatgtacggaagtcgcagcaggtagcttgccaccagggccgacgcgatgcacagcatgcacgagcgtttgtcgagcttgcacagcgagatgcccatgagcaccaccacccagcgcgacccgaccgagcgcacgcacgcacccgccagcagcaggggagccgattgctgcgcgatgcccagcacgatgagcgcgaaccccgccgagtacagcacgaacgagcccgccgtcagggtggtctcgttgatggacgagggcttcttgagcgcccacaccgccagcgccacgagcgttaccacgcccacgagcgacgacgcgtcgcgcgcctcggacatgacgccgatgtactgcggatacagcgccgcgttggtcagccatgtgccgaacagctcggcgatcaacgcgacgagacagcgaacccacgtcgcgttgatggtgttccgtacctcgatcatacgcctcccccggccgtcgcccgcttccccgatgcaggcaagcctaccgcacttcaccctcgcctgacaaggggaaaccaccgttctggtaccacgggggtgagagaagcggacgcgacgaatgcgcgaacttggtcccctgacggtgaggacagcgcccgcgcggcgcggcatgatggccccagggttcaccaatcgtttctcaggagggaacaatcatgaagaacatcgcagaacagggtctttcgcgtcgaagcttcctgacgggcgccgcagccacgggcgcgctcgccgcgttcggcttggccggatgcgccccgcaagccaaagccgagacgtccggcgacgcgacgaaagccgatgccgccgaaaccaaggccgacgcgtccgcccaaaccgactggctgggcagcgcgcccgacatcgctgccggcgacattaaggagacgaagcagaccgacctgctgatcatcggcgcgggcaacggcggcatggccgcagccgccacggccgccgacctgggactcgacttcatgctgtgcgagaagtccggttctatccagcgcagccgccactggttcggcgccatcaacacgaagtacaccgagaccgccggcgcgcacgtggacgaaggccgcctgctcaacgagttctcgcgctacgcctcgggccagtgcgaccagcgcgtcatccgcgtgtggatcaaggagagcgccagcgtggtcgactggatcgaccccatcctcacgcaggccggcatgacgtgcgccttcgacaacgacatcgaccacgagaccggcggcacgagcttcgccctgttcccgatggagcactactactcgggcaaggacgccgccggcgaagcgctcgagcgcaacaaggtgctgctgtcttacatcaacgacaagggctacgacgtcacctacaaccacaagctggtgaagctggtgcaggacgacgccggcaaggtgacgggtgccatcttcgaggccgacggcggatacgtccaggtggacgccgcgaagggcgtgctgctcaccacgggcggctacacgagcaacgccgagatgctgcgcgcgtgcaacccgatggtcgaccgctgcgtcacgctgcagtacggctcgccgaacaacgtgggcgagggaatcaaggccggcatgtgggcgggcgcgcaaaaggacagcatcggcgcgccgatgatcttcgatcgcggcaccgtgaaaccgggggagaacgcgggcatcatcagcagccccggcgagacggctacgttcgtgggcaccgacaagcagttcaacctcggctcgcagccgctcatgaaagtcacccgcgacggcaagcgcttcgtgaacgagtccactccctacgacttctgctgcttcgcagcggccgagcacgagggtggcgtattctgccaggtgttcgactcgaaccttaaggaagacgtcaaacgcttcaacaccatcggctgctcgcggcaaacccagcagctgctggccaaagaagccgataccccgctcgacgagatctacgccgatcagctcgagaaaggcaccatggtgaaggccgacaccatcgaggagctggcagtgaagctgggcttttcaggcgaggcgaaggacgccttcctggccgaggtggagaagtacaacggcttctacgacgctcaggaagaccccgatttcggcaaggaggcctaccgtctgtccgagctgcgcacggcgccgttctacggcatctggtacggcggctcgctgctgaccaccgtggacggtctgcgcatcaacgaggacatgcaggtgctgaacgccgagagccagcccatcgagggtctctacgccgcgggcgactgctcaggcagcatcttcgggaacaactaccccgagtacatcgtgggctgcgcctgcggacgcaccatcacgttcgcacgccacgccgtccgccacatggtcggcgatctgtcctagcacatcctgcggctcgaacttccctccctttcgagcccttccattagcgaggccccagcgcatgcgctggggcctcgctctcgatagccgatggcaggtgccctgttggaagctacccctcggcaggctggaacgtatctttatcgggcgcgaaggactgcatggcctcaatggtgcgggcgaacagctcgtccagctcccagcccagcatttcggcgccggagcggatgacgtcgcggctgacaccggcggcgaagcgcttgtccttgaacttcttcttcagcgacttcacttcgaaatccatgacgctcttcgaggggcgcatcactaccgccgcgccgatgagaccggtcagttcttcggaggcgaacaggatcctctccatctgcagctcgggcttcggcagctccgggttgaagtcggaggtgtggctctggatggcgcggatgagctcgggcgagccgccagcggcttcgatgagcggcgccgcgtagatggtgtgcagctcgggctcgtcgtcgtgctcttcccagtcgagatcgtgcagcagcccgacgataccccagaactcctcgttctcaggatcgaactcgcgcgcgaaataacgcatggtctgctcaaccgtctcgccgtgctcgatgtggaacggatccttgttgtgctcctgcaaaagcgcgaacgcttcgtcgcgcgtcaggccagcctcgagtgtcgccatgatgctctccttctcgtcttcgattggatgctcttcgctatgctaccccatagggcgcgcgaagtcagcatggcaatccgttcgaacgcacgcctagaacacgatgccgagcgcgttcgccaacaaaccccagatgacgcccatcgcgtacagcgccacgatgatggcgatattctctttcagatggcggttcgtgcgaaccaacaccagcaggcccacgcccgccgacacgagcaaaccggccaacatggcgcccgagcccagcacgccttccacgtacagctgcgcgatgacgatgctggccgcgcagttcggcacgagaccaaccaacgccgagccgaacaccgacagcgccgggttcgcgccgaggaactcggccagcacgtcctcgcccactacggcaagcaggccgttcagcgctagcgtgatgaggaagatgaacagggtcacctgcaacgtatgtttgagcgcgcttctcaggattccgccttcgccgtcgtggcaatggcaatgctcctgctcacataagtcgtgaatatgcagcggcatgtcgatgcggcgcgcgatgcgaaggccggcatccacgaggaagcccatgatcatgccgatgatgatcttcgcgccgatgattttgaaaatgacgtcgggcggcacctgctcggcgatgaagatgggcagcatctcgtccgacgtagagaggaacaccgcgaacagcgttcccaacgtgatgacgcgcccagcccacagcgtcgcggcagccgcggagaagccgcactggggcactacgccaacgacggcaccgatgaacggccctgccgcgccggcgcgctgaatggcagcctcggccttcccacccgtcttatgctcaagccactccatggccagatacgtgacgaacagaaacggaatgatgtaaagcgtgtccttgatcgcgtctgccagcacgtcaaacgctatatgcatgatttcttccataacaacgtattgtaatccaatcaaggttctgtaacagcatcgtcgccgaacggtcaccaagagacccacgcccccggaacgcgcggaggccccgcctcccgaggggggcggggccttcgcatgccgaaacgcccttcgcgagcgcgacgccctatcctcccacagcctgacgctgcagtactttcggcgatggcgggcttaacttccgggttcggaatgggaccgggtgatccccgcctccatggtcgcgctcgcgcagggcgttcccgcgcgggcctgtatggccccgtcagggccgcgggatccccccgcgccaccctggcggttgcacagcgctcgtgactttcgatcgcgcaacccgagggatatgcatgcgaagaagagctcgggctattagtaccgctcggctgaggcgctcgcacgccttgcacctgcggcctatcgaccaggtgttctgcctgggcccttaccggaaagaggactcatcttggagacggcttcccacttagatgctttcagcggttatccgtgccggacgtagctaggcagccgtgccgttggtcgacaactgctgcaccagaggtccgtccaccccggtcctctcgtactaggggcagacctcctcaatcctcttgcgcctgcggaggatagggaccgaactgtctcacgacgttctgaacccagctcgcgtaccgctttaaatggcgaacagccatacccttgggaccgacttcagccccaggatgcgatgagccgacatcgaggtgccaaaccttgccgtcgatgtggactcttgggcaagatcagcctgttatccccggagtaccttttatccgttgagcgacggccattccactctgtgccgccggatcactagaaccgactttcgtctctgctcggcttgtgggcctcgcagtcaagcccgcttgtactcttgcgctctgcgaacggttgccgaccgttctgagcggacctttgcgcgcctccgttacgttttgggaggcgaccgccccagtcaaactacccgcctgacacggtccccccgccggatcacggccgggggttagatcgccgacgcgacgagggcagtattccaaggtcggctccgcccgggctggcgcccgggcttcgcagcctcctgcctatcctctacgcgccgagccaacgatcaatgtcaagctgcagtaaaggttcacggggtctttccgtccttccgcaggtaattcgcatcttcacgaataatacaatttcaccgggtccatggttgagacagcgcccaaatcgttacgccattcgtgcaggtcggaacttacccgacaaggaatttcgctaccttaggaccgttatagttacggccgccgtttactggggcttggcttcagagcttcgccttgcggctgacccatccgcgtaaccttccagcaccgggcaggcgtcagaccctatacgtcgccttacggctttgcagagtcctgtgtttttgataaacagtcgcttgggccgtttcgctgcgacccccggccgctcggggagctagtcccgtcaccgccaggggcactccttctcccgaagttacggagtcagtatgccgagttccttaaccatggttctcccgatcgcctcggtatgctctacctgcccacctgtgtcggttttggtacgggcgcctgcgtcccttcctagaggtttttctcggaagcatgggctcgccgacttcagcataagctttcgtctcgcgtctcaggatatatgcgccgctgatttccatgcgatgctccctacgcgctttcacggggacgtccagaaccccgctcggctacccttctccgtcaccccgtcggtgatagcggtccgcaggcggtacaggaatgtccgcctgttgcgcatcggctacgcctctcggcctcgccttagctcccgactgaccctgggaggattagccttgcccaggaacccttaggcttacggcggcggcgtttctcgcgccgctctcgttactcatgccagcattctcacttccccgcgctccaccgagggtcgccctctcggcttctccgctgcggggaaagctcccctaccactaatatagattagtccgccgcttcggtgtcatgcttagccccgtgaattgtcggcgcatgtccacttgaccagtgagctgttacgcactctttaaatgcatggctgcttctaagccaacatcctggttgtctaggcaaacgcacatcctttgccactcagcataaacttggggaccttagcgggcggtctgggctgtttccctctcgaacacacagcttagcccacatgttctgactcccggcctctgatccggcggcattcggagtttggttcgtgtcggtaggcggtgaagccccctcgacgatccagtgctctaccgccgtcggagaacggccgaggctagccctaaagctatttcggggagaacgagatatctccgggtttgattggcctttcacccctatccacgggtcatcccctccgttttcaaccgaagtgggttcggccctccacggggtcttacccccgcttcagcctgcccatggatagctcacccggcttcgcgtctgcagcatgcgactctatcgccatcttaaaggctcgctttcactgcggctcggttcaaaccttaacctcgccgcataccgcaactcgctggctcattctacaaaaggcacgccgtcaccccgctcgggggctccgactgcttgtaggcgcacggtttcaggtactgtttcactcccctctcggggtgcttttcacctttccctcacggtactggttcgctatcggtcacaggagagtgttcagccttggagggtggtccccccaggttcgcaccgggtttcacgtgcccggcgctactcgggcgccgcactcgcagtccgcgcggattcgcgtacggggctctcaccctgttccgccggccttcccaggccgttccgcttccgcgcggatttgtaactgcgtccatggtctgaggcccatggaatgcgcggtcccacaacccctcatgcagcaacgccctcaagcttgcacgtgcatgggtttgggctggtgcggtttcgctcgccgctactcccgcaatctcggttgatttctcttcctccgggtacttagatgtttcagttccccgggttgcctcctcgcgccctatttcattcaggcgcgggtagcagggcatgacccctgctgggttcccccattcggagatctccggatcgaaggccgtttgcgcctccccggagcttatcgcagcttgccgcgtccttcttcgacttcctgtgccaaggcatccgccgtgcgcccttagtatcttcttctcataactcaggttttcaggcatcgaatactcgatgctctcgcgatcgtgatgatgctcggtccccggccgcccgtcggacggccgggtaaaaaagatcattagtcaccaaacgctatgcaactgtcaaggtgcgcgggaggccgaagccccccgggggcagagccccggaagccggatgctgagacagcgggcgaagaggccaggcggaccctcgcgacgggacccgaaagagattgttgttgtttccaggcgggggagctctcgctcgacccctccggacacgtatcgtgtctccctagaaaggaggtgatccagccgcaccttccggtacggctaccttgttacgacttcaccccccttaccctccacaccttcgacgcctccgccccttgcgggttcggccggcggcttcgggtgcagacgactcgggtggtgtgacgggcggtgtgtacaaggcccgggaacgtattcaccgcggcatgctgatccgcgattactagcaactccgacttcacggaggcgggttgcagcctccgatccgaactggggccggctttgagggattcgctcgacctcgcggtctcgcagcccgttgtaccggccattgtagcacgtgtgcagcccagggcataaagggcatgatgacttgacgtcgtccccaccttcctccggcttgacgccggcagtcccccatgagtccccaacctaatgctggcaacatggggcaggggttgcgctcgttgcgggacttaacccaacatctcacgacacgagctgacgacagccatgcaccacctgcggacgctcctctcggccaccgggtttccccggcttcacgtccatgtcaagccctggtaaggttcttcgcgttgcttcgaattaagccacatgctccgctgcttgtgcgggcccccgtcaattcctttgagttttagccttgcggccgtactccccaggcgggatacttaatgcgttggctgcggcacggagggcggagccccccacacctagtatccatcgtttacggctaggactaccagggtatctaatcctgttcgctcccctagctttcgcgcctcagcgtcagttgcggcccagcaggctgccttcgccatcggtgttcttcccgatatctgcgcattccaccgctacaccgggaattccgcctgcctctaccgaactcgagcctcccagttcgggatccggccgggggttgagccctcggattagagatcccgcttgagaggccgcctacgcgctctttacgcccaatgaatccggataacgctcgctccctacgtattaccgcggctgctggcacgtagttagccggagcttcttctgcaggtaccgtcgaatttcttccctgctgaaagcggtttacaacccgaaggccgtcgtcccgcacgcggcgttgctgcgtcagggtttcccccattgcgcaaaattccccactgctgcctcccgtaggagtctgggccgtatctcagtcccaatgtggccggtcggtctctcaacccggctacccatcgcgggctaggtgggccgttaccccgcctactacctaatgggccgcgaccccatcccttgccgtctgggctttcccgggccccccaggaggggggcgaggagtatccggtattagcctcggtttcccaaggttgtcccggagcaaggggcaggttggtcacgtgttactcacccgttcgccacttcatgtccgcccgagggcggtttcatcgttcgacttgcatgtgttaggcacgccgccagcgttcatcctgagccaggatcaaactctccgtttaagaggcgggaatcgcttcccgctgaagtccgatcttggtttcggccctcgcccgccccccgtcttgagggtgcgcgctcgggccgggtttccgttcgcaagaatcgtttgcttggcttttctcttcttcgctgttcagtatccggttttcaaggttctgcggcgcccctcccggggccccgtcgctttcggttccacccgaagcgcaaggagatatattacgcgtccgttgccccgccgtcaagaacttttttcgagattctcggactttttttcccggcgccttccggcgccggggggccgcggggccccgccgccgccctccccctctcccgcggagaaggcagcccgagcatgttacccgcttccggccccgggcgcaagggggcattttcgaaaagctcggaaaagctcgctcagaacggcccggggcgagagggcgtgcggcgcgaggagggcgcatccccgtgccggcggcacgctccagaaggcgtgcgggcgccgtctggccgacgatgccgcgaccgtcctgttttgggccgggacgatcgccctcattccctcatatacagcaaagcgggacgaccgatggtcgccccgccttccgagttatggttgacgctacacggttatcgcaagccgcagcttacatcatgccgcccatgccaccgccggcaccggccatagccgccagagccgccggatccggatccttcgggatctcgttgatggtggcctcggtgatgagaatgagagccgcgacggaggccgcagactgcagagccgtgcgggtgaccttcaccgggtcgttgacgcccatctcgatcatgttgccgtactcgccgttggcgcagttcaggccttcgcccgtagccatgcccttgacgcgctcgactacgacgctgccctcgaagccggcgttctgcgcgatagcgcgcatcggagcttcgagcgccttgcggatgatggcgacgccgacctcttcgtccttgtcggccgcttccaccttgtcgagcgcgggcagagcgcccaccagagccacgccgccgccggcgacgatgccctcttcgaccgccgcgcgggtcgcctgcagggcgtcctcgatgcgggacttcttctccttgagctcggactcggtcgcagcgcccaccttgagcaccgccacgccgccggacagcttcgccaggcgctcctggagcttctcgcggtcgaagtcggagtcgacgcgctcgagctcggccttgatctggccgatgcgatcgtcgatggccttcttgtcgccggcgccgtccacgatgagggcggagtccttcgtgaccttgaccgtcttggcatggcccagcatgtcgatgcgggcgtcggccatggtcatgccgaagtccttgtcgatgacctgcgcgcccgtgacggcggcgatgtcctcgaggatgcgcttgcggcgatcgccgaagccgggagccttgatggcgacgcagttgaacgtgccgcgcagcttgttcagcaggatggtggccagcgcttcgccctcgacgtcctcggcaacgatgaacagcggacgaccggacttcatgatctcctccagcaggggcaccatgtcctggatgttggtgaccttctggtcggtgaggaggatgtagggatcgctgaggacggcctccatcttctccatgtcggtggccatgtacggcgagatgtagccgcgctcgtactgcatgccctcgacgatgtccatgtcgatgccgaacgtctggctctcctcgacggagatggcgccgtccttgcccacggcatccatggcctcggcgatcttctcgccgatctcggcgtcgccggcggaaatggtgccgacgttcgcgatctgctccttggtggagacgggggtggcgtcggccttgatggcctcgaccacagcgtcggtggccttctggatgccgcgacggatgcccagggcatcggcgccggcggtcacgttgcgcaggccctcggacacgatgacgtcagccagcagcgtggccgtcgtggtgccgtcgccggcgacgtcgttcgtcttcacggccacttcgcgaaccagctgggcgcccatgttctcgatggggtcctcgagctcgacttccttggccacggttacgccgtcgttcgtgatcagcggagcaccgtaggacttctccagcgccacgtaacgacccttgggcccgagcgtcaccttgacggcgtcggccagcttgttgacgccggcagcaagcgcgctgcgcgcgtcggcttcgaacttaatctctttagccatattgctcatatcctttcaacctgacggcttttcgtggcggcctcctagccgctcagaacccgggagctttcgcacacggccaataaggccgcttagctcaagcacccggaaccttcgtggctatgagcctcaccacgaaaaccctgctattaccaacgttgaatcaaccggcgccttttatgcaaacacagcgtagaggtcgtcaccgcggaggatcagcacgtcctcgccttcgacgttgatctcggtgccgccgaacttgccgtacacgaccttgtcgccgaccttcacgggaacgggaacgaggttgccgtccttgtcgagcttgccctcgcccacggccagaacggtaccgctctggggcttttccttcgcctccgtcgcgaggaacagacccgaagcggtggtctcctcagcctcgtcctgcttgacgataacgcgatcacccagaggtttcaaattcataacgttgccttcctttcgtccgacgtatgcacgaacccgtttgtcgcatgttcgctatttaaccactcagcagtggtgactgctagcactcatcggtaacgagtgctaaacactgcgttatcatagcatcatcaacactgaatgcaagggcattcaaagaaatctgagcgctcgtgactgagattttgcgcaatcgtcaaacgatcatcacaatttactcgagtcgccatttggcatgcggcatcagttcgcttgccaccgaacggctaccggatgcctggcctcacgaggccgccttcgtaggctcggacaacgagctgggcgcggtcgtgggcatcgagtttcgccatgatacgggccaggtgcgttttcaccgtggcgggcgagatgaacagctcggaacctatttcgtcattcgtgaaacctcgcgcaaccagggcgaggatctcgcgctcgcggtcggtaagagtgcgtagaccggccgcaacggctgcagcaccgccgagcgaagccggccgtgcagcgacgaacgtctctataaggcggcgcgtgatagagggctcgatgagcgcatcgccctgggcgacgacgcgcaccgcggaagcgatctcgtcgggctcggcatctttgagcaaaaagccgctggccccggcggccaaagcatcgtacacgtattcgtccagatcgaacgtcgtgaggatgagcacatgcacgttttcaagcgcggcatcgtcgcgaatggcgcgcgtggcctcgatgccgttcatacgcggcatccgaatgtccatgagcaccacgtcgggatgcagccgcgacgccagttccaccgcttcatggccatcgcgcgcctcgcctaccacgtcgatgccgtcgtacgacatcagtatgagcttgaaaccgctgcggacgagatcttgatcgtccgccaccagcacctgcacgcgctcttccacttacgcctccgctcccttcatcggcaagcaggcaaccacgcggaagccgccgccggctcgatcgcccgccgaaaacgtgccgcccaacaggtgcacgcgctcggccatgccggcaatgccgtgcccctctccgtcgacagcctggggcagcgcgcccgatgcggccgcggacgccgagagcccgcacccgacgccatcgtcttccaccaccaaacgcgcccgtccgtcctcgacggccaggcggatgagcgccttgtgagcaccagcatggcgcacgatgttcgtagcagcctcgcgggcgatgccgaacaacgccatgtccacgtgggccggcacgtccgcacgacagtaggcggccgcgtcgagcgtggtttcgattccggcgtttccgaggtaggcacgcaaatcgtccaaccgctcggtaccggatgtcggcgacgtttcggccgcgtcatcgccgcagcgcagcacgccgatcatgctgcgaatgtcagcgagcgcgcctttcgcagtggtgcgcacggcggagatagcctccttcgccgcggcgggatcgcgatcgatcatgcgctcggcagccgccgcctgaatgctgaccgccgacagcgaatgcgccgtgatgtcgtggacttcgcgcgcgatgcgcacgcgctcctcctccacacgccgagccgcctcttcctcgcgggtgcgctcggcttcggcagcgcgatcctcggtggccttgacgtaggcgcgatgggttcgatacgcatagccagccaagccggcggccaccgcgagcacaatattctggaaacgcgtgaacagcaccatgttggccgtggcggcatgggcatcggcgaacagaaggccggccaccgctagaagtaccgccgcgaccgtctcggcacgaccgcgctcgctggcgatggtgtacagggcgaccaccgggcccacgatggtgagcgagaacccgttgaacgcgttctgcaaacctagaaacgacacgaggcagaacaggaacacgggccacgggaacctacggcgcacgacgagcggcaacgtggtgaccgccagcgctacgaacacctgcacgttaggcaccacgttcaccatgccgagatactggcgcagcgccagatcgggaatcacgatggacgaagcggccaacatgagctgcacgcagccgaacaggaacgccgctgccgttaccgcgacatcgaacccccaatccttgggacccatcggtcggttgttcatcagaaaggtatccatgaccccatactacgcgacccgcccgaggtgcgccataccccagccgatgtatgttcgcccgatggcgacctttcaacgctccagaaggtcaagcagttcctggcgcgtgtgcacgtcgagcttggaatagatgttgcgcacatggctgcgcaccgtgttctcggtgacgaacagcgcgtcggcgatgtacgccttcgtcctgccacgtgcaaggtagacgaggatctcggcctcacgctcggtcaagcccccttcccgggcgacgcttgcacagcacgcgtcaagcgtcgagtcgatctcgggcaccgaaaccgaatcggttccgaccgcgctctcgttcggcgcatcggcagaagcctcttcggcgcgtcgtcgcttgcgatcgcgcgagaagaacacgagcgccatgcacagagcatacagcaccacgacgatgatcacgagatagcgcatcgtatgctcggcctcgtcgcccggaccgccgccggcgaccccggccgcgtaccccgacaacagcgccacggccaggcatacgcgcgcgacgcccatagccacgcccatcagcacgtagggcgataccttgcgcgtctgtgccgcctcggcgataagataggtgatgagcagcgcgacgaagtagtagctgccgagcaacagcatggagaacaccaggttgtagcgctcgctgagaaacggcaggaacaccagcatggccgcgagcacgggcatgaccacacgcgataccgtggacaccttggggatgcgatgcgcaacgaacacgatgaagcagaacacgacgattgcgcccacaatggccgcagccgacacggctcccgagccctcgaaatcgatggatcccgccagcatgaagctgttgagcaacccgatgacggcttccagcacgaaaaacgccaccagcgagtcgcccaactccaaaaatgcatcgcgatacgcgccccaacgagcccgcaaggaagttttcgaagaaagcgcttcggcaggttcggcggataccgtttcggcgatcggccgttcgttatgcgtttccacctcgcaggaagcggctcgcaaccgacggcgcacaaaccacgcgcacagacccgagacgagcagcaaaacgcagctcgaacgcatctggacgtctccgggcaacggagatagcaccgaggaaaccaccacgttcagcaacatgccgagcgcaatctgcaccacgatggagctgggccggctcgccgagagcacctcgatccagaacagcgacagcatgacgctgcccgcaccgtacagcaagccgggaaccagcagcgctagatcaggcggcagcgacaagatcacgcccagcaacgcagcgaggttccccgccaacaacaatgccgtcggcagcacgtatggcatggtgttcgccttgagacgccccgtccaggcaagggtgacagcgacggccgagcacacgatgatggaacatgccaccactacgttgaagaacagatcgggcacgaacatgaagggcgccttcacgaacgcgtatgcggagaggtagacgttcgaattcacgccgcgatacaatccgaaacccaaaatgaccacggctgagtatacagcgggatgagcccacgcgcgcgacggctgtttttgtctgttccctcccgtttccctcataggggcatcataccggaaacgtcggaagcgcacgaagcaaacatgcaggattccggccttccacagcaatttagtccgaaacggacggtgacgattccccagatcgaacgtagggtgaaccagtcgtcgctcaaccgcgacgcaaaggagccatcatgcgacaacagggaggaacagtatggaatcagcaatgaatcgccgcaatttcctgaaggcagccatcgcctcgggtgcggttatcgccgcaggcggcgcactggcaggatgctcgccgaacggcggctcgaccggcggatccggcgaggccgaacaggtggttggcaccgcccccgtctcgttcagcgaagaaaccgacgttctcattctgggcacgggcatcgccggcatgtcggcagccatggatccggtcgaagccggccataaagtgatgctcgtggacaagctcgaccgcgtgggcggagagagcttcatcgcttgcggcgtcatgaacgtcgttggatcaaaaatgcaaaaagacgccggcatcgagggcgaccccgagcaaatgtgggagaagttcctgcccgtgctcgagaaaaagggcgagaccgacgacatggactacaagcacaacgtctacgtctaccaaaccgaatgggcgaaccgcgtggccgccgactacggttcggtgttccaacccatcaccgactacatgaacacgggcgcgcccacgtccatgctgttgcccggcaacggcatcggcgacatgcaggcggtgctgacgccgctgcagaagggcttggagcagaaaggcgccacgtacaagctgaacctgcgcgccacgaacttcatcgtggacggagagggagcgcccatcggcgtgcgcttcaacgacgagaagaacaacaagaccgtcgatatccgcgcaaagaagatcatcgtggccacgggcggtttctcctgcaaccaggagatggtttccacgtacttgcccagccaggctcgcttggggccgctgaccgtgaactccatgggcgaaggccaccagctgtgcaaggccatcggcggcgtgtacacccacatggacatggaagcgaaccgcatgagcgacctcgctcaggtgacggtgtggggctacttctcgccgcaagtccaggtaaccccgcagggccgccgcttcatcaaggaggatcagagccacgactcgcccgacaaggccgtcgagttgggcttgggcttctggtggaccatcttcgacgatcaggccatcaacagcagccagaaatggaacgtcgagatgaacatgaagagcaacgccgaccgcctcgtgggcccgtgcaactcgctcgatgagctggcggcagcgatggatgttccggccgacacactgaaggccacgttcgagacctacgacgccatggtggccgcaggcgaggacaccgagttcggcaagaagctgttcctgcagtcgctttccgcaccgtattacgcgatgaagcacttcccgtaccgctacaagacgcacggcggcatgaagatcacgaccgacagccagttgacggacaaggacggcaatcccatccccaacgtctactgcgccggttcgaccgtggccgatagcggcagcgacctctctccgaacgcgggcagcggcctcatctccggcaaagccgtagtcgaagcgctgaaggcgtaaagcatcctgtcccctccctcaacgccggaaggctcccgctccgggagccttccggcgcattctctaccgatccagatattccaacacggcattcgccgcctcgcggccgctgttcacttgatggccgaacgcgacgcccggcatgttgatggtgtacacgttgcggtacagcatattgccgtcgttgccgatggcatagagaccctcgatagggttgcggcgcccgtccagcacgcgatgccgcccgtcggtggtgatgccgccaaccgagaagaagtagttgtacgacagttttgccaggtagaacggaggcgtctcgatgggcgccatgaggccggccgccttgccgaagtcgctgtcagccccctctccgcacagttcattgtagcgatcgaccgcagccttgagcgcatcggcgtcgaggttgaatcttccggcgagatcggccaaggaatcgctctggtagatgctgcctccaccgttagccttgatcgcgtcgtagaaggctttcttcgcatcgtcgtttttaccgaaaaaccgatcgaagatggcctggtcgaaaaccacgtaattccccttgttgcccttacccggaaggcactgcaacgcgaggttgtcgttcgcgaggtcctcgcgcgtgtagcgccggcacgcctcgttcacccacagcacgggaccgcccgaggcgatgccgaaatagccgtagagcgggttttcagccgcatcgtggaagtcgatgggaggaaaagcctcgatagcgtacaggatggactgagccgaatcggccatgaagctgcatgcgccgttgtccatggctatgcgatagccgtctcctgcagcgttcggcgagcccacgatgcgtatgccatcggtgttccaaccctgctcggcgacgatctcctcgttgccgccgaagccgccggttgcgagcaccaccgccttcgcgctgtaccgcaccacgccctcgcctccgtctgcgtaggcgccgatcaccctgccgttcttcatgacgaggccgttcactgcggttttgagatgcagctgcacgctcagctcttcgagccgcgccttcatcggctcaacgtatcccacagccgcctttccgtctttgaaccagtggaacgtggggaataggccgacgcgatagtcgtccaccttgccggagtacatgacgccctgctctatgcaccaggtgatgttgtcggccgacttgctcacaaaatcgagccatacatcgccgttttggcgatgctgaccgcgcgagagctcggcttccattatctcggctggctgcatgtcgatgccttgctccagctgcaacgtggaattgacggcgaacatgccctcgacgaagttcgcattgccgcccacctggttgctcttgtccacaaggatgagattcgttccgttaagagccgcctgcacggcgcacgccaagccgctgccgcctgcacccacgataagcagatcggcgtcgtaggtcttgtccaccttgcttggcgccttgctgacgggcaccgcgcccccgttcgcaccagaaccggttccgccggcgccgccggggccggcgtcttgcggcggcgcgcaggcgttcaggccgcccaccatcgccgcagctccggtaacgcacgcgcccgtcaggaacgcgcgacgggatatgcccgcaccacgttcatcctcgctctccccgaacatagaagtccttccatccgcgtctacggcctctcaagcagcacggatgcgcgccgcatgcggctttagtaggtatggggacattctgtcatgagtctatagagacgcggtatccgccgctttgcaccttggcaacccgtcggcaacgcaaagcgacaccctgggacattagtcaaaacgagacagagggacagggttaacgtctctttagtcagaagcttgcttcgcagcatcttcgtcgtcgagtgcggcggcgaccgctttgcccgccagcatgccgaacgcgccgttcgacgcgaggcctccgatgcttgacgcagctgccgcaccgcaacagtagacgttgggaatgacggcgccgacgacgctgagcacctgaccggactgatttgttttcacgccgccgttggatctgtaccgctgcggcagctgtttaagcgcgtagtaggggccttccaactcctccaagaacaacgtgcgcccgaaatcgccgtccttgccgtctttcacgaagccgttgtagcggtcgaacgtggcgttcagcacgtccggcgaaacgcccatgccctcggcaagctcgtccaggtcgtcgaacggcccgataagacgctttgcgttcttgctggccacttccgcaacgctgcgcgattggctgctctcggtcagctgctttccgaacaccgtccaccagtagccgcgctcctccgagaagcaggcgcccgccgcagcgttcgcgtcgtcctcgcgcgcgaaacgcttccccagcgcatccacgatgaccgtggggccgaacaagccccaggcggtcgcctgcggcaagctgccggtaagcggcgcagccttgtccatgttcaccagctgaccgcccaaaagcgcgcacagctgctgaccctcgcccatggaggcgacggtgtagcaccccacgcgctcataatcgggcgtatgctcatgcacgagcggctggctgctggcgaacccgcctgtcgcgacaacgatgcgccgagcccgcacgtcgagcaccgatgcgcccgaccctgcatagaaacgcatcccgcacgccgcgccgtcctcatccaaaatgaacgcgaccgcccgatggcccgtagaaaacgtggcgcctttcgccgtgagggcgtctcgcagcggcatcataatgctctgcatgtcaccgaggccgttcttcggcagcatgatagccgcattcaccttgccgtccacgaaggttttcggatcggcgaactgcgccccgtaatcggatgccaggcgattcgcccattcggtggccgcgaagaacagggtctttgcgaaatcaagatcatcgtcgcctgcagcgctcaactcctttttgcgcgccccccatgcctcgtcaaccgtcgcattcacgcccgcatcctgctgcgcagtcgtgccggcgatgcgcataacgccgttcgactcgtagctttcgccgcccaacagatcaagtttctcgaccaccataacggagcgcttcgcctcgagcggatccatggcggcagacaaccccgctaccccgctgcccacgatcaacacatccacgtcagcatcgaaggcgatgggcggctgccccattacgcttgattgaccagcggtttcgttggctttgttcgtcgccgccagaggattgtccggcagctttcccgcctcacatgcgccgagggttccgcccacggccaataccgcagcggacaagcctgcaagtttgaagaacgaacgacgctccacgacggacgacctcctttgcgacggaaacggaaacgaacggcctcagagtatagtgacgcgaaaacgttttgtcgtgaggcgccgacatgccgtcacgcaatctgcgcaatggagactgcgaaacgagcccagcgtgccaagggaggtgccaaggggacgctactcgtagaacgtggcgtcggggcacgggggctccaaagctcgcttgaatgcggtcgcgcgcaccgttcgcagcacgcgctcgacgtcggccgcatcgaacccttcggacaccaacgctgcggcatccaagccgcgatccacatgcgctttcaacaatcgatcgagcgtcgggtaatcgatgcccatgctcttctcgtcttcctggtcgggtgagagctcggcgctgggcggctttacgaacacatgctcgggaataggcggaacctcgccggcgatctccgcttgtcgattacgccagcgggcgacggcgaacacgtcggttttgtacaggccgccgataggagcgaacgcgccggccgtgtcgccgtacagcgtggaataccccatcatggcctcgctcttgttgcccgtgttcaccagcatccagccgtatgcgttcgacagcgccatgaggcacaccatgcggcagcgcgcttgcgtgttctcggccgccagacccgagagcttgccgccgcacgcctcggcaagcgcggcctcgaacgcccgatacggttccgcgatggagacggtgcgcgtccggattccgaggttgcgagccagatcgagcgcatcgtccaccgagtggtcggtggagtacgggcccggcatgagcacgccgtgcacgcgatccgcgcccagcgcgtccgcacacatcacggcgaccaaactcgagtccatgccgcccgacaacccgatgacgacgtcggagaatccagcgtcgtccatgaagcctttgagcgcgttcacgcagagacgataccgttcgctattctccacgactccctcttcctccatcatcatctcgcagatccaccaatatcagcgagaagcgccaaggtgcccgagatcgcccgtttcgccagctgcgccgcgcgaagcgcaagtccctttagggaagcgtgctttcgcacgtgagggaaagcggaaaaggggcgagatcgggcgcattggcgcttcgcagcgtcgacttcgttccgacggctgacaagccgtcggaactaaacggcgcgaatgcggttcgccagccactcggcccaggcgtccacgccgtcgcctttcgtggcggcgatggggaagatgggagcctgcgggttgagctgcgtgaccgccgcctcgaaggcctcgcggtcgaagttgaacacgggcatggtgtccaccttattgagcaccacggcctcggcgacctggaacacgccggggtacttgagcggcttgtcgtcgccctcaggcaccgacaagatcatcaccttggcgttctcgcccaaatcgaagtcggtggggcacacgaggttgcccacgttttccacgatgatgaggtcgaggcgctcgaggtccagcacgtccaccgcgcgcttgatcatggcgctttccaggtggcacgctccacccgtgttgatttgcacggcggcgatgccctgcgccttgatcttctcggcatccacgctgctggcgatgtcgccctcgataacggcgatgttgaactcgtcgcgcagcgcgtcgatggtggccaggatggtggacgtcttgcccgaaccggggctggcaagcaggtcgagcacgaacacgtggttctcggcgaaacgctcgcgcagttcggaggcgatcgcatcgttcttctggaggataggctgcttcagatcgatttgcatggttagtcctcgttctcctcgtcatcgtcgggaatgtccacttcgatgctgtcgatttgcagttcgcgaccggcgatgagctcggtggcgaagctgccgcattccgggcacagcatatggaaacgatcgtgctcgtattcggcaccgcattccaagcagcggcttttcggcttcaccatggtgatttgaagctcggcgtcttcgcaaagcgtgccttccgacagagcctcgaacgcgaacatgagcgcgtcttcgatggcctcggtcatctctccaaccgacaggctcaccttcagcacgcgcgtcgcaccggcctgttgcgccgatgtcgtcactgcatccatcacgcccgtcatgattcccaattcgtgcatggtgctccttcgtgcccgttccgcctctatcgttcatgcttatagtagcccaagagttattcgcgcgaaggtatcgatgcgtcaacggcgcgaatgactcctagaaaaagcaaaaaggcccgtcgatctcgacgggccttcaccatcagaataaggctacttcgatttcttggccttcttgatgccgagctcggcagcgcgttcctccgcctcttccgcgtcaagctcctcgttctgcttcttgatgcggtttcgcaggacgacgcgggcgatgagcaagctgccttcgtacagcaccagcaacgccgcgaacatgagcagcatggtgatcggcgaagcgtccggcgtggccatagccgagacgaccatgagcacgacgtacaccgtgcgccagctgccgcgcagcttcttgtacgggacgatgtcgaagatgacgaggtagaacacgatgagcggtagctcgaacgcaaagccgaagcccagctcgaacttgatgatcatgtcgatataggtcgacgctcgcggcaccacttcacccagacctgcagcctgatccgtcagccactgaaacgcgggatcgagaataatgagatagcagaagatcgtgccgaatataaacaagctcacggccgcggcaaacgtgggaacgaaccacttgcgctcgctcggcttgagcgccggcagaaagaacgcaagaatctgccataggataacgggagaacaagcaacgaccgaggtccagatcgatatcttgaaacgagtcgcaaacgcctcgaacggatcgagcacgatcgtgcccgccaacaaaccatcggtaccctccggcagatacggagaaatcggctgaagcaagaactggctgataataggcgttgccatgtagaacacgactacggcgatggcaaggcaagcgatgatgcgcaccaggcgcatgcggagctcgcccaggtgatcgaataggggcattcgtgccggtccgacgggcatggcttactcccccttctcgttcttgttggccttggcggccgcttcggcggctgccttcctgttcgccgcgcgcgttgcagcggccttcttcgccgcggcagagcgtgcggcagccttctcggcatcggtcttggccgtaggcttcgcagcgctcttggaagcggcggcggctttcgcagccgtcggcttggtagccggcttcttagcggcgggtttcgtgccgtacagctcgtcgggcgacggcttcggcttcgcggcggtcgactcaggcttggcggccggcttcgcagtctccgcagccttcggctcttccggcttggcgaacgatccgtcgggcttggccaccggcttggcagcagcggcggtcgccgtagcggctgcggccgtcgtcgcagtcgtttcggcagcaccggccttctcggcttcggcggccttcttggctgcgcgctccttgtcgtagcgagccttgcgctcggagaagctctcggtcttctcctccttgtcgtctttgccgatctcgccgaccttcgacagcgcctccagcgggttcttgaacggctcatcggacgtagggtcgtagacctccgtcttgagcaccttgttcatttcttcctgtgcgcttctgaacttgttgatagccttgcccagcgtcttagccatagcaggcagcttgtcgggtccgaagatcaaaaacccgaacagcagaatgaggaatagctcgaatccacctataccaaacaaagcaaacccctttgtgcggttactctactctcgactccgcgccccgtgcgcggcaacgattcatagtatcacaaacactccccgtcgacccgaacgagatagctctacagaaaaagcatgacggattctcacacgggaaacgcgaagggcgtccgcaagcgggagacgctgcgaacgcccttcgtcatcgggcggaagctaggagccgttccccaggaaggcgagggctacggtggggatgcccaacgccagcacgaggatgacgcacacgacgatggtgaatatcttcttcgtgcgcgcggccgcctcgcgacgctccttttccttgcgctctcgctcctgagcagcgcggatgcgctcgcttttctgctgtgccgttaacttctggttcgttcccatagattacaacctcaacttaccgcggatttcgatgatgcgggcgatgttcctggcaacctcgacgcccacgttccacttgttcttctcgtacagcgcggtgccgttcaccatggtcatgaggatgtcggcgccgctgcaggtgttgaccacggccgaaaccggatcggtggtgggcgtctgatgcgagccggacaggtcgaccgcgatgatgtcggccagcttgcctatttccagggagccgatcttgtcgtccagcttgagcgcgcgggcgccgccgatggtggccatctccagcatggtggccgaatccaggaactcgcccacgttcaccgcgcgctgcaccagcatgccgatgcgcatctcggtgagcatgtcggtggagtcggttgcggccggcgaatcggtccccatgcccaggcgaaggcctgcgcgcatgaactcgttgatgggagccacgcccatgcccagctgcgcgttgcagcgcgggcacacggccacggccacgtcgtactctttcagcttctgcacgtctttgtcgtccacgtgcacgcagtggatggccagcacgttgtcggactcgaacgcgccccagttcaaagcgtagcgcacgggcgtcgtgccggtgggcagccacggcggaatctccacgaagccgcgcttctggtccatcgtgtgcaccgagaacggcgacgagccgtacttgatgaagttgtactcttcgcggttgccggccacgtgcatggcgacgggcacgttctcgcgccgagcgaattcggacaccttcgagaacatggacggatggcaggcatacatagccgcgggagccacgccgatggtgatgcggtcgccgtcaacctcttcgcgccagtgcatgatgtcgttctcggcgatgcgcatggcgtaatcgacgcggcgcttgtccatggcgcccacctcgcggtagatgacgctgcgcatgcccaacttctgcgtggcggtgcatgcggcgccggtggcagtgatatcggcgacgcaggtaatgccgctggacagcgcttcaagacccccgaggatagcggagtcgtaccagtcgctcacgtccatctttgcgcttttctccaacatggacgtgacccacgtggtatagggcacatcgtgcacgataccgcgcatcacggagttctcgaggtgcgtgtgcaggtcgacgaggcccggcatgatagccgcctggccgaaatcgaccacttcttcgtcgggatagcgcagcttgagcatctcggccgtgccgatgtcgcggatgacgttgtcgcggacaagcaccgcgcccttctgaaacggctcggacgtgatgggaagaatgtattgtgcgcacaaaagcatatctgtcccgccaatctcttagaataatcgcatgatgcgtatgatagcattcccgacccgctcttcggggaaagcacacaggggaatcggcaggcgcatgggcagggtcgcttgctcgcgcattgccgccgcccccgctacgcccgcccggccagcagcggggtaacctcgccttgcgcgagcaacgtgatgccgcgggtggcacgggaaacggtggtgtacaggcgacggcgcgacagcgggtcgtcgggaaacgcgcgctcgctggcgtcggggacgatgacgtggtcgaactccagtcccttcgccagcttgagtggcaccagcactacgccgctggcgggcagcgtggcggccgcgtcgatgagcgcgggagccgcgtcccccagcttcttccgcagcagcttggcctgatgcttctgcggcaccaccacggcagtgaggccgtcgtcgccgaccgcttgagcaagaacgcgccgcaactcacggtcgtaatcctgctcgcttgcgcacgcgatgatctccggcgcggtgtcggcgcgctggatggacgagatgctcaggcgctcgtcatcgtccagcaggctggcgaacagctgcgtgatctcgggggtggagcggtagctggtcatgaggcggcactcctccagcgggccgcgcacctcccggaacagcgcgcgcacctggtcgaacgtggcggtgcccggggcgatggcctggttctgatcgcccagcaacaggaagtgcgcgcgcttgaagtagcgcgccagcacggccagctgggccaccgtgtagtcctgcacctcgtcgatcatcacgtacttcgcatctgcgttgccgaggcccgtcagcgccatcttgaggtacagccactcgaccggaacgaggttctccacgcccagaaggcgcatgccgatgcggtcgatgcgcagccagtcgtcgttctcgacggctcggcgcgcgtcggcgaaccgcaaatcgacgtactgctgcgccacttcgcgcacctggctctcgtcgtgcgggtcgaacgtttcgcggaacagctccacctgctggtcgagggtaagcatcgagatctcgtcgagcactttgtccgaggccgccagctgcttcaagcggctgtccagacgccgcagcagctcctcgcgcatgagcgtgaccaggtgggggccagcagggatgtttctgaacttggccgctacttggaggatttgtccaaccgtgaccaggcgctcgccgttgcagtggatctccttgaaatcatgctggtcgaacgagaacgtcgcgcacgcttcgtcgatgcgctcgaacgcgtccagcgacgcaggcgcctgtccgccggaccgttcgggcggcatgaggcctcgcaggaactcatcccacgtgaggcattcgggattgcgctcccccaggtcgggaagcacgccttcaatgtagcgctcgaacaccgggttcggcgtgatgaggaacacctcgctgggatcgaggctctcgcgctgctggtagaacagatacgcgatgcgctgcatgagcaccgacgtcttcccgctgccggcgatgccgttcaccagcaaggtgggcgcgtccgcgtggcggatgacctggttctgctctttctggatggtggcggtgatggcctgcatctgcgccgtgcggcgcttcgacagcgacgccagcagcatggcgtcttggatggcgacggtcgtgtcgaagtaggcgttcagccgatcggcttcgatgtcgaactggcggcgcagcttgagatcgacgcggatggtgcggccgttggcctcgtaggacgtggggccgttctcctggttgtagtacacctcggccaccggcgagcgccagtccaccacaaggcggcggtagttctcgtcggcgatgccggcggtgccgatgtagagctccttcggctcctgcccaggcttcatctgcagaaccaccttggcgaaataaggttgcttgagcagcacctggatgctggtcagcttttccgcatcgacggtttgcgccaggttgtacgcgtcgatgacgcggttcaccgtggcgaagtcggcataggtttccatggcgtcggcgtagctggccaggttcaccgacagctcgtcgaccatggccagcttgtcggcggccgcgtctttgctgttagcctccatcttcgccagcagatcgcgacccatggtctgcagcttggcataggtttcggtcagatgctgctgctcttcttcgaatacggggtcgaattcctgatcgagttcgggagtttcatgctcgtgttccaaaggtgctcctcaatctccttcgtgggctcgggagattatacgctcgccctgcggaaaaaaggagcctgttctcgccaggttcctttcctgtataataaagacgcgcccgagaggcgcacccttccaatctttcctgatcaacggagcatcacctgtgagcatcgataccgctaccggcaaggaagcgcccgcggacatctcgtccgaacgcgtgaaagacatcttctccaccatcgcgaaaaaatacgagcggttcaacgccgtctccagcttcggcgcgtacaagacatggctggcgggcatgatgcgccaggcgcccatcgacgagaacgccgacgtgctggacatcgcaggcggcaccggcgacgtgacgttcaccgtggcgcgcgcgaagcatccgcgccatatccagtgcaccgatctcgtggatgagatgctggacgtggcccgcatgcactatgaggacggtaaggccgagggcgtaccggttgacttcgaggtggtggacgcacagcatatcccctatgccgacgagtcgtacgacgccatcaccatggcgtacggcatccgcaacatgcccgagcgcgaccaggcgctttccgaaatgttccgcgtgctcaagcccggaggagcgctggtgtgcctggagttctcaacgccgccgaacgccgtatggcgcgcgctgtacggcttctacctcaagcacctcatccccttctggggcggcctgatcacgggcgaccgcgagggcttcgtgtacctgtcgcgctccatcaaggccttccctaaccagcaaggcctggcagccatgatggagaaagccgggttcgaggatgtgacctggaaaaactataccggcggcatcgccgccgtccacgtggcgaaaaagccgaaggcgtagacgcggaatcgccgcaggctcccatatcaggattccacctcggaaacaagacttacaaacaaatgttctgcttgataaaatgaactcgtacacgagccagtacaagcgctgcgcataagcgcagtccgaagaggcgaaggtgttccccttccgcctgacgcaacgcttgcaagatcctcgcagccagggaacgagggggccgacttaggaactcgcgcccgcaaggtaggaggatatatggcacgtatcatgcatgaacgcgtaccgcttgccgtaatcgaaggaggtgagaacatggcggaatttcaacctgatccgtttttgacgtcccttgggatgtcggtcgaccagcaacgtgcatatgatgcgtactgcgacgcgattgtagacgcctcggaagccgagatgaagcgcacgggggttacgtacaccctcgacgaggtcttcgaacatgcacacgaggaagtcgagcgccttaagcgtgaatatccccgagaagattgggggcggccatgttcccagtaagaaccaccgctcgcttcgatgtgaacattcggcggataacgcagaacttgtacttttcagggatcgaagatcccgaccaaggcttgaaaacaagtcttgtcgccgcgctcgtcaatgtgcgcacgttcccggaagcctatcctcgcacgggcaaggcaaggcgacgcttcgtcttcgaattccgttcgattccccacgtggtattgtacgcattcgacggcgagctggtcgtgctgcacgatatccacttcgcccgttcggcgcaaacggcacactggctgagcgagtgatcggacgcagtgttccttcacggctctgctcgcggaggaacactgcgtgactttaaccgacgatctctgcgacggacttgatgtcggctatgcggaacaggcgctgcgtggcgcccttcgcgccgaacggggcgggacactcgatgagcacccattcgtcgtcggagtcgaggatgataccgcgtccttgcgttgacggagactcgtcagcaaaaatgcgccctggcgcccagagagtgaacgcacacgcgcaaccgtgcaactcgcgaagctgggaagcgacgaacacggcgttccccttctgctcgcgttcgaagcgatcgaatacgctctctttcgcggaatcgcccttcttgtgcagcctgttcaaaacgaagccgagctgcacgatgatgatgaccaacaacagctccgtcacgagatcgcctcctcgcacgttgccgcatgcggactatcatcctcgttcggccaagccagtatgctgtcgatgatatcgatgtcgataaggcgcactgcggtttccttcttcgaccagggcgcaccgccgcccagctcgtgttcgacgcgcagccaaccatcgctgacatcgagcacgcgcgctttctcgggcatcgaaaccgctttgaagatgtcgatttcatcatgcgtataccgatagcagatgcggcattgcttgccttccagatggcggagcacatgcaggtcacgcggctttccagcggcctgatcgggatcggccactaccacttccacctcgtcggccaccagatcgtccaggctcacgccgtacagacgggcgagatcggccgccttgtcgagcgacggagcaccctgatcgcattcccaattggaaacggtctgccgcgtcacgcccagcgcggacgccacctcctgctggctcatcccccgcttcttccgcagcttcataagcttctcgcccaccatgcgctatccctttcccagcgattccatcgggtaccattctcgctgatcaggggcttgcattgaagcaaatattcccgacatttcgtcaaattcgcttggcgggacaagctcctcgtcccgtttaatgggcggcatcaccatgcacatgacgaaaacccgagaatccgactccccgtttaacgcataatgccggatcgcgttctacgacctcgcctccggtgaaggcatcggctggaaagatccgcgccgtcgcgttcccgacgcagacggggggggcgttcccgcacgccgacccttcccttggcgaaaacacgttctgatgacggttttggtagggaaaccaccggatcgggttccctttcacccgatccgcggaacgttttcccagttcgagaaacctaagcggatgtccgcaggggattttctctaccaaaaccgtcatcagaacgtgttttggtaggaagctggcgcggctccgggggcgaggagcctcttccgaggattatgcgccacccggggagtcggaatcgagaaatcgaaaagcgccaaatcgcgccaaatcgcgccaaatcgcgccaaatcgcgccaaatgttgttatactgagtttcctctgaatcactcggaaagggcgcccatggacgaagcagaattgcgcagcgacctcgcaaccggagagaccccctccatcgagttcaaacgctgcggaaactcggttggaagagacacgttcgagaccatctgctctttcgcgaacagcttcgggggcagcatctacctgggagtagaagacgatggaaacgcaatcggaatccccgaagagaatatcgtgcccgtgaaaaggaacgtgaccaacgtggttcacaatccgaacgttttcgacccgccggccacccttgagttcgaagacatcgttttcgagggctcgtcgcttgttcggatatggattcctcccagtccgtcgatccaccgatacaaagggaggatattcgagcgcatcgaggacgccgacgttgtcgtgagcaccgaaagccagcttacggctttgtgcgtacgcaagcagaacatctacaccgagcagcgggtgttcccgtatgtggaagcaagtgatttgcgcatggatttgcttcccgccatccgaacgatggccacgggaaaacgaacccgacacccttggaacggcatgaccgacgaagacctcttgcattcggcagggcttttcggcaagaacttcgtcacgggcgaaaaaggattcaaccttgcagccgtcttgttgttgggcgatgccgacgtcattcggtcgctgtgcccttcctataaaacggatgccgttgtcaggataagcgaccaggatcgatacgacgatcgcgtcatcgtcacaagcaatctgatagaagccttcgaccaactcaccggcttttgcacgaaacatctgccggatcggttccaccttgaaggctccgttcgcgtgagccctcgcgacatcatcgttcgcgaggtaatctcgaacatgctcgtgcatcgcgaatacacgagcccatttcctgcaaaactcatcatcgacaatgaaaggttgcgcacggaaaatgcaagtcgcgcccctttcatgggtcgaatcacgctgagcgatttcaatcctatcccaaagaaccccctgataggcgcattcttcaacaacatcgggctggcggaagagctgggttccggcacacggaacctgtacaaatacaccaaagtctactctggggcggaaccggttctcaacgagggggcgattttcacaacgacggtccccctgcacgtcgagaacgtcgaacccgtcgcggagcgtcctcacgatatgctttctcttgcaagacaaatcgccttggatcgtggatatgcaacggtttccgatctcgagcgcaagggagtcgcccgcagaaccgctcagcgcgaactggcagcactcgcccaacaggggacgctgcaagcgaaaggaaacggtcgggcccgaaaatatttcctgccttaaaaccctattcgacgatcgaccgaaagaagaagaagaagaagaagagagagagagggggggggtcgtaagctcgaagcgctcctattccacgcgcatcatgcgataccctacccctacgtgggtttggatgtagcgagggttcgcaggatcgggctcgatcttcttgcgaagcgtggccatgaacacgcgaagcgacgagcgatcggacgcgagtatggtgccccacacctctttgagcaggtagttgtgcgtgagtaccttgccggtattgcgcgccagcagacagaggagcttgtattcgaacggcgtgaggtgaatctcctcgtcgtcgcgccacacgctgcctgccgcataatcgatgcggaggctcccgttgcggtagacggcttcgtccgcatcccccttcatcgctcgctcccgatccaatcggcgcagcgccacgcgcacgcgagccagcagctcctcgactgagaacggtttcaccaggtaatcgtccgctccggcatcgagcgcttccactttgtcggcatcctccaaacgcgccgatagcacgatgaccggcagcgacgaccacccgcgcagcgtgcgaatgacctccaccccgtctccgtcgggcaaaccgagatcgaggatagccagatcgggcggctgcgacgacagttcgagcagcgcctgcgacgccgtacgggcttcccggtacgcatatccgtgcaaatcgagcgtggtcgtcacaaggcgccgcaccgccgcgtcgtcctctaccaccagtatccggtacccatcagccacgcgcttcctccgtcgatcgcgccaccacgtccccggcctccaccgctgccagcgtgaacgagaactcgctaccgtgcgggttcacattgcgcacgtctaaagtgccgccgtgcacttcgacgatggaacggcatagcgacaagcccaagcccatgccgcgcttgaaatcgccgctctttccgccccgccggccggtggagccattgtagaacatgtcgaagatatgcttgcgatcttcctcggaaatgcccgggccttcgtcggcaaccgcgatgcgcacccgcggacgatcgtgctccacgacccgccgcgcgctcacgactatgcgcccgtcggccggcgtgtacgataccgcgttgttcaccaggttgatgatcacctgcacgatcaaacgcgcatccatgtcggccataagcagctcgtcttccaactccacgtcgacgcggcgtctcccagcgcggcgatcgacgtgctggagagcctccctcacgacatccgccaccagctcgggctgttcggccagctgcagcgtgccgttgtcgatacgcgtgatggacagcaggttctccacgagcgtgaccagccagcacgcgtcgtcgtggatgtcgcggtacaagtgctccttctgctgcgccgacagcgcgccgcgatcgtgcaaaagcatgtccgcatcgcccgaaatgctggtcaacggtgtacgcaggtcgtgcgagatggtgcgcagcagattcgcccgcagcgtttccttctccatgcgcatctccatgcgccgcctatcctcggcgaagacgatctgctcggtagtctggccgcattcgtccaggatggccagcaaaaggttcttctcgaaagccccgaagtcctcctccccgtcgatgtcgtccatcgcgatgccggctactccgaacacagcgtccttcgaatggatgggcaggtacaggcattgcgaatcggcgagcgtgtcggtagtggctccggcacgctcgttgttcgccgcagaccatgcggcgaccgcggactcttcgggcgatgcgagcgcgcaggcaccggcatcgccgcccagcgtcccagggacgtcgtgcaccacgggcttcgcaagacgaccgtcgatgcccaagcggtacatgaccaccgggcggttcagcagcttgatgacctgctcggccgcaagccggaagcactcgtccgcattgcgggcaccctgcagctttcggctggattccagcagcacttccatgcgatacgcacggcgcgcggtgctctcggcctgacgcttcatgcggatggccagcgatgatgcagcgaatgtgcccacgagcagaaacgcgaagatgatgggatagttcagccctaccgcatgaagcgtgaaccgcgggatggtgaaaaagaagttgtatgcaaacacgctgcccatcgacacgaacagcgcatagaagaagccgtcggcgcgcgtagcgatgagcagagccacgatgaggtagagcatgagcacgacggaaccggccaacccaagggaatagatggccagtccgatagccgtggcgatggcgaccgacgcgagcgcacgccaaacgtcagcgcctgtcaggcgaaaccctgtggcttcggacagccggccatattgcgcaggcaagtccttcgtcggcacgacgtcgaccacggccccatgcgcgagcttcatcagccggctcaccaggctctcgcgcagcagggaacgcaccgacaggccacccgtggcgttgcccaccacgatatgagtcgcgccggccgtcaccgcgtactgcgccagctgctgggctatatcgtcaccgaacagcgtgactacgtgcgcacccagctcttcggccagatcgatgttggcgcgcagtcgtccgcgctggtcggaatcgaacttcttgctctgcgacgactcgaccaccaccgcagtgagcgccccatggtaggactccgccatattcgcagcggcccggatggctttcacgttgcccgtattgtgcgttacgtacaccagcacgtcctcgccggcctccacgcgcgcgcccgcctcggtgcattcggccttgcgcgtcagccgatcggccatgcggcgcagcgcgatctcgcgcaacgccgccaggttcttccgggagaagaagttgccgagcgccgtgcgggcgcgatcgggaaggtatatctttcctgcctccaagcgctcgatcagatcgtctggctcgatatcgacgagctcgaccgatgcagcctggtcgaagatacggtcgggaatgcgctcggctacgctcacgtgcgtgatggcggcgatcttgtcattgagcccttcgaggtgctggacgttcacggtggtgaacacgttgatgcctgcgcgcagcagctcctcgacgtcctggtagcgcttccgatgccgacaacccggggcgttcgtgtgggccaattcgtccaccagcacgatctggggatggcgcgccagcacggcgtccaggtcgaactcgcgcagagagatgcctctatgctgaaccgtcgatggggagatctgctccagtccgtcgacaagcgccatcgtatcggcccgcgtgtggggttcgacgtaaccgacgaccacgtcgaaccccttttccagcacggcgtgggcctcctcgagcatggcgtaggtcttacccacgcccgccgcatagccgaagaatatcttgagcttgccgcgcgtatcgccctcggcagcctcctcctcgacgatttgccgcaggatcgcatcggggtcgcgccttgcttcgtagtccataatcacactcgcagtcgtatcggtgccgccatcatagcacgccgtcgagcatcaggttcactttcagcacgttcacgcgcgcatcccccagaaaaccgaactggggctgctcggtgcattgcttgatgatgtcgcggatctcggacgcgctcttgccggttgtcctcgccaaacggtccacctggtattcggcggcagccggcgagatgtgcggatcgaacccgctgccggagttcgtcacgaggtcgctggggatgggcttgttccccatctcgggatgagccgcgcggatctgctcgacgcgatcctgcaccgccgtcgcgaactcgtcgcccgcagggctgagattggacggggcgtaccacagcacgtcgtttccctcggcatcggtgaacgtgcccgtgctggggttcatggcgcggccccaaaggtgcttctcgtcggtgaaccgctggcccaccagctcgcttccgtacttcgttccgtcgacttcgatgatggagccgttcgcctggtgcggaaagaaaagctgcgccaaacccgtgcacgccgccgtgtagatcacgccgcacagcaccgtggtgacgaggaagaacaacgccgcacttccccaggtcttcgcttggtttcccaatttgaacgtcatgatggatcctttccttcctacgcgacgcccagcgccgtcaggcccatgtccagcagtttgatggcggcgaacggcaagacgatgccgcccaggccgtacacggccaggttgcgcttgagcaggctctgggacgtggcctcgcggtacttcacgcctttaagagccaacgggatgagcgccacgatgatgagcgcgttgtatatgacggccgccaagatggcggtggtggggctggtcaggcgcatgatgttgagcgcctcgagcgcggggtacaacggcacgaacaacgccgggatgatggcgaagtacttcgccacgtcgttggcgatggagaacgtggtcaggctgccgcgcgtcatgagcagctgcttgccgatgcgcacgatgtcgatgagcttcgtggggctggaatcgaggtccaccatgttgccggcctctttcgccgcctgggtgccgctgttcatggccacggccacgtcggcctgcgcgagcgccggcgcgtcgttcgtgccgtcgcccgtcatggccaccatgtgtccctcggcctggtactgccggatggcggcaagcttcgtctcgggcgtggcctcggcgatgaaatcgtccacgccggcctcggcggcgatggcggcggccgtcagcgggttgtcgcccgtgatcatgacggttttgatgcccatcgtgcgcaagtcggcgaaattctccttgatgccatgcttgacgatgtccttcagatagacgacgcccagaatacgatgatcgcgagcaacaagcagcggagtgccgcctgcgcgcgagacatgctcaaccgctgcggcgcactgagcgctgtacgtgccgccgcacgactccacataactcttgacggcatcggccgccccctttcgaatctcgtggccttcgaagtccacgccgctcatgcgcgtctgcgccgtgaacgggatggtcgtcatgcccgccccttccagcacgcgggcgcggatgtcgaacagctccttcgccagcaccacgatgctgcggccctccggcgtttcgtcggtgaggcttgccagttgcgccgcgtcggcaacctcgcgctcgcttgcgccgtcgactgggatgaactcggccgcctggcggttgcccagcgtgatggtgcccgtcttgtccagcagcagcacgtccacgtcgcccgccgcctccacggcgcggccgctcatggccagcacgttcgcctggttgaggcggctcatgccggcgatgccgatggcgctcagcagcgcgccgatggtggtaggcgccaaacacacgaacagcgcgacgagcgaggcgatggtggtggggttcgcgatgccctcctggctggcgccgaacctgctgaacgcgaacagcgacacggacacgaccaagaacacgatggtcagcgcgatgagcaggatctcgagcgcgatctcgttcggcgtcttcttacgcgcggccgattccaccatggcgatcatctggtcgaggaagctgtgaccggcatcggccgtcacgcgcaccaccagccagtcggacagcactgtggtgcctccggtgacggccgagcgatcgccgccggcctcgcggatgaccggggcggactcgcccgtgatggcgctttcgtcaaccgacgcggctcccatgactatttcgccgtcggcgggaatctgctcgttcgccgtcacgaagaacaggtccttcttcttgaggacggccgaactcacctcctcggcgttgagccggaagaactcggccgggtcgtccgcatgggtgcctttggccacaaggccttcgttcagcttatgggcgtcgatgtcgcgcttcgcggcgcgcaacgagtcggcttgagccttgccgcgtccctcggcgagcgcctccgcgaagttcgcgaacagcaccgtgagccacagcaccgccgatacggcgaaaatgaaccccggatgcgcatcggcgatgccgaacagcgacagcgcgaacaggccgagcgtcaggatagccgaaatatacaccatgagcatgaccgggttcttcgcctgctcgcgcggcgtgagcttcgcgaacgagtcgatcacggcgcgcttggccaacgcgctcatcgacgccttgcgcccggcgagcttgccaccttgcgggcttgcgcccataggagtttcgttcattgcagtagtcgtcatctttctttcgcccgccttcctagagcaccatcatcagctgttcggccacgggacccagcgcaagcgcggggaacatcgtgagcgcgccgatcagcagcaccatgagcacgagcaggaacacgaacagcgcattgctggtggacagcgtgccggcgctcgtcgccaccttgggacgcacggccaggctgccggccagcacgcacaccgccgcgatggggatgaagcggttcgccagcatctcgaatcccaacaccaggttgatcagaggcgtgttgccgttgaatcccgcgaaggccgaaccgttgttgcctcctgcggacgtggccgcgtacagcacttccgagaacccgtgcacgccgggattgttcaggctgttcgccgtcgccgggtcgaggctcatgatgcccgcgccgactaggatgagcagcggcgtggtgatgcacaggatcacggccatgcgcatctccttcgggccgattttcttgcccaggtactcgggcgtgcggcccaccatgagcccggcgatgaacaccgtgaggatgacgaagcccagcatgccgtacaagccgcagccgacgcctccgaacaccacctctcccagcgccatcaacacgatgggcaccatgccgccgataggcgtgaagctgtcgtgcatggcgttgaccgaaccgttcgaggcggccgtggtgaacgcggcccacagcgacgagtcggtcacgccgaagcgcgtctccttgccttccatgttgccgccggattgcccgctggcgcccatgtacacctgcccgtcggccgccagctggggcgtgcccatctgctcgaacaccgcgatggccacgagcgcgcctaccagcaagatgaacatggccgcgaacacggcgcgcccctggcggcgatccatgacgaagcggccgaagctgaacacgcacgccacggggatgagcagcagcgacaggcattgcaccaggttggtgaggggcgtggggttctcgagcgcgctagccgagttcacgccgttgtagccgccgccgttcgtgcccagctgcttgatggcgacctggctggcctgcgggcccatcggcactgtcgcctggtcgatggtttccacggcggccggatcgtcggcatcgacgatgctgccatcagcggtcacgccgaccggctccagcagctgcaccgtctcgtactcgttgaaattctgcggcgagccctgctgcacgtcgatcatcgtcaccacaagcgacagcgggatgagcacgaacagcaccgcgcgcgtcacatcgacccagaagtttccgaggcccggattcccttcgctcacgatgccgcggaacagcgcgaacaaaacgcccaagcccacggcgggcgtgacgaagttctgcaccgtcaggccgatcgcctgggagaagtagctgagcgcgctctcgccgctgtacgcctgccagttcgtgttcgtcacgaagctgacggcggtgttgaacgcgagatcccaggacatcccgggaatcccttcggggttgagcggcaacaggccttgcagcatgagaatggcgaacagcccgaccaggcagatcgccgaaaacgcgaacgcgctcacaaggtagcgcttccaccccatgtcctcggacttgtctacgcggatgcagcggtagaccgcgttctccaccggaaccagcacccgcgagagcacggtcttctgaccggccatgaccttgttgaggtacgcgctcagcgggatggccaaagccaccagcagcgccaggtacacgccgtattcgaacagctcgtctatcaccgttcgtcaccgcccctgagaagcttgtagaacaggtagagcgcaaggaagatgctcaaccctcctacgaagcctgctacgaattccatcttgatcctttcctatcggtccttttgcgtggcggcgcatacgacagcaccgccacgaacccagcataggaagaaccgcatgagcgcggcgtaaagatggagggtgcgggcgttaagatgaggttaagacggaggtcggccgggaggggccgcgcgccagtccgggggggtcggggaggccgcgccagtcgggggggcgccagccgagggggccggccgccgcgttcgacctgaacgggctcgcgccggcatcgcccgcagaaggccgggaagcggggcggcagagaatgcgcgctatgcacgattatcggggcctgccgacggaggcgaggagggaaacaccaggtcggaagaaatggcgagggagaagaatcgtgcatagcgagcattctcttccatgcgcagggaaacgatccgtcgcagggcgctcgccggcacgggtcccatcctgcgcccccctccaacgcgtacggatgtttcacgtgaaacattccggctgaccgggatgcgcgccgtcccacgagccggacgggcggcacgacggcagccaaggaccggggattgggaacccgcgcgccaaccggggggttgctccctgatgttcgtcgaaacgcgacacgggaaggatatcaaggcggaacgtgggaagaaaacgggctcccgggagcgccctacgatgccgtgatctcggttcccatctgggctccgttgaggggctgctccgggtcgtccaggctgaaggtcgatatctccaccgcgacggggtaggttcccgcctccagcgggcggttcaggcgaatctcgggaacggccttgcccggcggcaccagcccggactcgtagagcacctcgccggagtccttgagcttcacggcgaacttcatgtagcaggggttgccctcggtgttgacgaggggcacctccacggtgtcggagcccgcctccatggtccaggccgagtacgtgggcacgcgtatgcggccccgctcggagccgtcggggttgtcatagcccgggatggagtagtcgaccgccgcaggatccaccacaggacccgatgcgggcctcaggaggaggaacgccgcagcggcggcgagaacaagcgcgaggaggacgaggacgacggcgagggtacgccggcgccggcgccggcggcgcgcggtctcaagggcttcttgcagcaaggtggttccgcctttccggctcggtggacagggcgcccccgggagccgggggcgctggcgcgggcccccgtcggcgcgctggcgctgcaggggactcgagggcccgccgcgtcagcggcggcggccccggggcgcgtcgagcctaggcgcccgtcgtgtcctcgtagctgaaggtgagggtgtcggtgtgcgcgccgcccaccttggcgtcgcccgtgcgcttggccacgcccgtcgccgtgtggttggtcttgtcgaacgtgccgatcgcggtcttggccgtgaccgtcttgtcgaacttggccttggtcaccccggcgcccgtgtaggcgatctcgtagtcgaccgggtcctcggtgcccttctggagctggaagccgttggccgactccaggtagagcttcgcgccgcccgccggcagcttatcgatctggccgaccgagccgccgggggtcgtgttgtacaggttcaccgacgcgtccacggtcgtgtccttgttggtgccgaaggggatggaggtcgggatctcgaagccccagccgttggtgccgggcacctgctgggaggacgagtaggtcacgctcgtggtgccgctctggttcacggcgaacgccggaacggcggtcccgacggtcagggcggcggcgcacgccgtcgccaggagcacacgtcccatgttgcggttcatcttgacatccatattcttcctctctctcgcgcgccctcgggcgcgcactgcttgcttgcttccggggtcggccttcggccggcccttccttctatgtccacgcgctctcgcgcgagaaggacctcaagcgggcgctcagcgcccgtcgtcgtccatcgagcccgccccctcgacccggcccggcggcccctcaaggggcgaggttccagagccgtcggccgcctccggaccggacgggccggcggctgccgggaccggggcgttcgcgcgtcgggcgagggcggccgccgccagggcggacagcgtcgccagggcgagcgcgagcggcgcggcccagggcagcgcgtcgcccgtgcgcgtcaggccgccgacccaggcggccggcccgcccgcgaccgggggcgccccgccggcgaacgcggcctccaccccgcccgccgcctcctcggccgagagcgagagcgagccgtccgcagccggggaggcatcgcggccgccgacgcgcaaggacgcgagataggccccctcgtcgggcacggcccgcagcgagagctcgccgccctcgggggcctcggcgaggacggtcccgccgcgcacggagagcgcgacggagccggacgcgtcgacgagttccaaccgcccggggccggctgccgacaaggggacggcgagggagcgcggagcgtactcgacgagcgcggtgcccgagcgcccctcggcatgggcgcgcggcgcacccggcgccgccggagcggcgagggcgagggcgagcacggcgagggcgaggacggccgcgcgggccggccgcagcgggcgcggggcgatcacggcgccacctccctggtcgtcgcggacacgatgtcgacccggaactccatggtcccggagtagcgggcgttggcgaggaacgagccgaccgggtcgacgctcctcagggagaacgacccgctgccggcggccggatcgtgcgggtcgatcaccatgagcggcgcgggcgcggagccgtccccggggtcgtagaccgtgcccgaggcgtcgagcacctcgaagtcccgagcccctccgcctccggggagcgagagcgacagcagcggcgcgcccgcggagggcctcgtcaccgacacccggtaggcctggccgaccggccaggtcgcgcccggcagctcgggggcggcggccacgaccacgctgtggtcgcccgccggggcggcggggtccgagggctcggaccagaccctgtcgccgtagggctccagggacagggagctcggaatggagaggaagcccaggagggccgggtcgtccgcgccgtagtcgaccgccttccactgcgcgaacagcgtcagcgcgccgccgtcggcgggggccgggtcgggcgtggagatcggagtgccggcggcgaagtagttggagccctgcttgcggtcgccgacggcgaggtccggcgaggtcgtccagccgtcgaactcgtagccgcccatcgtgaacgcgttcccgggcaggtcggcgggcgcgccgtaggacaggctcccgacggggtccatcgtccccgacacgtaggcggtgttgcggacgatcttgtccggatcggccgggtcgggcatgccaaggcgcccgtccttcgccaccatggcgtcccagccgtcgtcgaaggacacggagtaggagttcgcgatccagcggttcgagtacgaggggttctctcccgcgttgacgacgacgtccttggggacgacgggcgccttgtccccgctgctcttcctccatccggacttccttgccgcgtcgtaggcctgggggtcggtgtggtagccgggcctgtcgaggccgtagttcggcacgccgtgcaggatctcttggggcgaggagccggagggcacccactggaggtgggagtccctgcggtcggagtagccctcgtcgttgtagaaaaggaactcgcaggggacgccctcctccaccttgccgaggatcatgctgccggcggacacgggggtcgagctcccctggcggtatacgttcatgccgtaggagaaccgcgtgcccgaggctctgagcgaatcatccttgaacgtcgccctcccgctggtctgccagtcggtgttgctcggatcctccgtggagccgtccacgagcttgagggcgaccgagatcaggtgagagacggggatgccgtagccggactcgagcgcgtcgaggcgcacgtcgcccaccgtatcgctggtgccctcgtacatcgccgtgcccttggggagcgtctggtcggccagcacgttcgcgccgacgcccgtgtcaagcgccgcgttgttcggcagctccaggtaggggatgtggttgcccgcgaaagctttctcgcccacggagcgcagcgtggagggcagcctcacgtccgagatgttcgcgttctcgaaggcgctcgcgccgatcgtctggacccggtacttgtcgaggggcaggtagcccatgggttggccggtctgcggatccggcaacgcgccgaggttcgtgcccttgaaggcgcgcgcgccgatcttgacgttgaggatcaccccgccggcgctgaccgcctcgggcatcttgatgatcgagagcgcgacgcaattctcgaacgcgccagcgccgagcgtgacggtcgccgacggcaccccgctgtaggagccctcccccatcatgaccgatttcagcgacgtgcagcccttgaaggcgttctccccgattgcgggatcgctcgcggagccgtccgccaaggaggtctgcccgaagtcgatgcccccgagggagatgcaatcctggaaggcgccggccccgacgcgcgtgaacttgctgttcgcagggatgacgacctccttcaagcccgccaggcccttgaacgcgtcgccggggatgaacccccagaacttcgagatgatcaccttcgtcacgcccgggttgcccgagatcacgcccctcgcgggggctgggacgttctcgtcctcgaaggagaactcacccgtcagactgttgtccgcgaacgcgtagtcggccatgccgaacctcaccccctgggtgagggggttgatctttatcttgttattctggaagcagctgctgcccaagacgatcttgtcgaccgtcgtgttcaggaaagacaccttcgtgatcagattgttctggaacgccgaagctcccaccgagtccagggtcaccgggaacgtgagcgcgccgccgatcatgttgcctttgaacgcgtcgacgccgaccgtggcgagcttcgtgttctcgaggccgagaagggaggtgagcttcggggccaggctgacgccatccctcgtgccgccggcgaacgcgctctcgttcacccctttgagggatgacggcagcgcgagctcgcccgcgagcttcttgcagttgtaaaacgccttcgagcccacggtctcgaaggcgggggggaaggacaaggctcgtgatctccccgcagctgacgaaggcattcgggccgatcgtggtgaggctcgtgcacttggacaggtcgatgacgcccttcggtcctcgctgctcgtattcgttctgcatctgaaaggcgctcgtcgatatggtctgcaggttggtcgcctgggagaagtcgatgttgcacttcaggttcgagtacgtgttctggaccgagctcccgcgggcgatctcgacgaccttcttgcccgcggggctggtcgccggcacgtgtaccgtgtcggtcggctgaacggagccggaaaagccggttatcttgcaggtggtagcgtcgatgtcggtgaacgtccacgaaaagttcaacggatcgtcgttcgcgcgcgggtcggcgccgaggggaccgtcgagctgcggcgcgggggcgcccacgagggggccgtccgcctcggagcgctgcgcggcatcctcctggacggcgtcggacgcgccggggccgagcacgtcgggccggccggcgtcgggatcgggcatgccggggccgggggccgcggcatcggagccggcttcgggatcgggcgcggccggggcggcggactccggggcccgcgcggccggaaccggggaggcgtcggcctccccggcgggcgcgggggccggccacagggcgacggccacgagcgcggcgcacgcgacgcggacgacggcccgcgccgcgcggcccctggacatgcttcgtttacgctgcgttctatccatttccacactcctgcgggtcatgtcggttcggcgcgcccccgctcgaggcagagggcgcgctcagccccccccccgtcgcgaaggaggccctcgaaggcttcggcgtcgagcgggggcgagcacaggtagccttggagcaggtcggcgcccgcctcctccaggaaccgcgcctgcgaggtgtcttcgacgccctcggccaccacgaccatccccagctcgtgaacgagccgcaccgcggcgcccacgacgaccgcgccgcaccccgggtccgcgcggaggagcgacgcgtcgagcttgacgacgtccaccggcgcgccctcgagggcggacagcgacgtggaggcggtgccgaagtcgtcgacggccacggagaaccccgccgcctgcaggcgcatgagcgcacagcgcagctggtcgggatcgagcctccaggcctcctcggacacttcgaggtgcagcaggcaggccggaagcctccgctcgcgcagcagcacctcgaggcgccgcgcgaggagggggtcgagaagcgtcgagcgcgccaggttcgccgacacgggaaccacggggagatcggcgtctatccaggcgcgcaggcggtcgagggcgagcgagacgatgtggaggtcgtgggcgggggccaggccggcctcctccaggagcggcacgtaggcgcccgggccgggcgcgccgggttcgccccagcgcgaaagcgcctcggcgccggcgaggcgccccgaggggcactcgaagacgggctggaaggcggggcgcaggccgcccgaggccatggcggcgccgaggccctcgagggcgtcctggtagagcagggcctcctccagcatggccgggctgaagcggcgcacgcgcgggccgcgccgctcggacttggccgcgcgcagggcgagcagggcgcgctcgagcgcgtcggcggggccgggagcggaggaccccgggccggcctcgcaggtgcccatgcgcacggcacagcgcgccccggcggggccgcgcgagagcgcctcggcgagggccgcctcctcgagcagggagcggggggcgaggacggcgaagcggtcggcgcccacccggcccgccaccgagcgcgggggcagggcctgcgcgagactcgcgccgaggtaggacaggagctcgtcgccggcctcgcggccgtggcgggcgttgtaggccgcgaagcgctcgacgtcggcgcagacgaggacgtaacgggtgcgggggtgagcgatcagaagagcctcggcatgcgcgaggaagcccgggcgcgcctcgaggccggtgagggcgtctcgcgcgcagggggaggcggccggggccgccggggcggcggacgctaggcgcgggcgaggctcagaggaagcccccccccccgcgaggcgggacgctacgcgatcaaggcgctcagtgagccccccccccccccgtcaagggggcgcgaggagccgtacgcccgtgcgctgccgccagtgtctcagccatcgccgcgcctccttccgcatctcgtcaaatgataccgtggcggtcaattacgagggatgcgcgcatagccgtcaacccccggatcgcggagcgcggggtttccccttgggaggggggcaggggtgccgtcgggggctcatcactggcgtcgcgcaatatccttcgcctccgcgcctgacggcgccgcgctcatagaatgacagggccgcgcccgttcggaaaaaagattgggggctcagtacggctcgtcgaggttggcgtgggcttgggcgtcggcttccagggtgaagaacttgccctggttgtggcggtcgagggccaccagcgcgatcatgccggcgttgtcgccgcaagcgctcaagggcggcagggtgaggcgcacgtgcagacgctcgcacagctgctcgtacgcgtcgcgcagcgcggggttcgcagccacgccgccgccgaggcagaacgtgcgcgcgcccgtctgctcgagcgccatttcggccttcttcacctgcacgtccaccaccgcctgctggaaactggcgcagatgttcggcacgttcagctcgcggccggcggcgcgttcgttgttgatataggtgaccaccgcggttttcagacccgacaacgagaagcgcaggtcgcccgagtgcatcatggcacgcgggaacgggatggcgttcgggtcgcccttggccgcctcgcgcgagatgacgggaccgcccggatagcccaggcccagcgccttcgccaccttgtcgaacgcctcgcccaccgcgtcgtcgatggtagcgcccagcgtttcgtagtcgccccagcccttcatatgcacgagcagcgtgttgccgcccgacacgagcgacaccaccgcgggcggctggaaatcgggcgcgccgatcttgttcgcgtacaggtggccttccagatggttcacgccgatgaacggcttgccggccgcccacgcggcgcccttcgcgaacgcaacgcccaccacgagcgcacccacgagccccggcgcgtacgtcacggcaatggaatccagatcgcgccaggtcagacgttcgatgcccagcgcggaagcagccacgtcgaagcactcgtcgcacacgccgcagatagcctcgatgtgcttgcggctagcgatctcgggcaccacgccgccgaagcgcgcatggaagtcgatctgcgaggccacgacgtcggcgataagcgtgccgttgccgtcgacgatggcggccgccgtctcgtcgcaggacgattcgatggcgaggatgagggggcggcgttcggatgtttcgcgtgaaacatccgtttgcacttcgtcacggagggagcgggcatcgtcgctggcagcgcccaccaccagctccatgccggccacatcgtgcctggccaacggcagagggccctccatgatgacggcgtcctcgccgtcggagtagtaacgcgggcgcacacccagcgaacggaagccgagcgcggcgtacaactcctgcgcaccgacattccccgcccgcacctcgagcgagcaacgggacgcgcccaggtcgcgcgcatcggccgccacgtgcgccaacagctcgcgcgcgatgccgcgtcgccgcatggccgggtcgacgcccaccttgaggatctgcacctgcccgtcgacgatccacccgccggcgtaacccgcaagcgcttccccttcgtaagctgcccaccacacgcggtcggcgcgggggagttcgtcggccacgagcgcttcgctccaagcgtctgatcccatgactagggactccaacgtcgcgacagcgcctgcatgggcggcatcgagcggcttgtacgtgatgccatgctcgtcgggctgtgcgttcaggatggcggtatcgtgcatggtcgcgcgctggtcggcccgcttcgccacgtcctgcacgccggtcgcaaggttcttcggatcgttcttcgccaggcggatgcgctcgttctcctccgcatccgataggcgcgtgtacaccggcagcgcgaacgcagggtcatggcgacgcgcatcgagcgggtcggcctcgcccgcccgccacgccgcctgcagcgccagcaacagcccgcgacccgtcggcatccacaactcggcaggcagcgccgccccgcagccctcaaataactccccatatttcttcagcgcatcgccgcaaagaagacgtgcggaaacctgcggccacgcgtccccctcggcagggtcggcgtctgcgatggcgcccaccaagcgagtctccccttcggggacttgctccgcttcgctccgcggcgccgcgcccgtcgagccgaaacgtcctgcggacgtttcgtgcgagccaggactgtccgagcgactgggcaccgtcgcagacgccgacccggacaggtcgccctcggcagcaagttcccgcgcggcgtcttcggccttcaccacgcggtcggcctccaaccgctcgatgcccgtatcgttcagcagatagcgcaccgggtacacttccttgcgcatggcgtcggccaccacggacagcggcccgcgctcgcccgccgcccacgcgttccacgccaccgcatcgagcgacgatacgccaaccagcggcacctcgagcgctgacgcgatgcccttcgccgtagccatcgcaatgcgcacgcccgtgaacgatcccgggccgcggcccaccgccacgcacgcgatgtcctcgcgtgccacgccgtgttcggccaacgctgcgtcgatgcggggcagcagctgggtgttcgacgcgcgtcgagcctcggcttccacggaagccgtcaactcgatcatacgcgacgacgcatgcagcacgcccaacccgatagcgatgatttcgttggcagtatcgaaggcgagcacgtaccgtgcccgctcggacgccccttcgggacgcaaattcatgtcgctcacgcagttcctcccgcgcacttcatcagccgcgatttcgaatccttcgcccacacgaacagcaaccgacgtgcacggtcgccgtaagcgtgggtccgcacggagcggttgccctcgtcgtccaccctgatggatatctccagataaccgtacggaagcgcctcagggaacttctcaccccactcgacgaacgacgcaccgtcgccgtcgatggtctcgtaatagccgatgtcctcgagctcgtccgcctcctcgagtcggtacagatcgaagtggtacaacggcagcgagccggcagggtacgtcagcaagatgttgaacgtggggctggtcacctggtcgcgcacgccgagtcccgccgccacaccctgcacgaactgcgtcttgcccgcacctagatcgcccgacagcacgatgacgtcgcccgcctgcaagtagggcgcaagcgtggccgccagctgtttcgtcgcctcggacgaggtggttttgcgcatgtatgtaagtccgtttgccatgcttcgtatcatacgctaaacgcgcctgcgcgaaccagccctcccgaatatccccgcattcgagggaagatgcgccgcgcgtagcgctcgatgagctatcatcgcagcaaacaaaccggtccggccttttcggcgacaacgtaaggagccacgccatgtacgaacagcgcatcaaaaccgtgaggcgcaacctcgcgaaccgaggcctcgagcagatgctcgtatgcgatccccgttccatccactatctcaccggagcgttcatcgagccgggcgagcgcttcctcgggctgatcgtcggatcggacgctcgacccaccctcgtgctgaacgcgctgttcgccgcgccggccgacgccgcctgcaccgtgcgctcgttcaccgacaccgacgatccgctggccatcgtcgaagggctgtgcgatgccgacaagccgctgggctgcgacaagaacctgcctgcccgcttcctgctgccgctcatggagcgcggcgcggcgagcggcttcgtgctggcctctgatgcggtagacgacgcgcgcgccatcaaggacgataccgagcgcgagcttatgcgcgccgccagcgccgcgaacgatgccgccatggaccgtttccgccggctcgtgcacgagggcgtcaccgaggccgacgtggccggccagctggaggcgatctaccgcgaactgggcgcgcagggccactcgttcacccccatcgtcagcttcggcgcgaacgcggccgacccgcaccacgagcccgacgacacgccgctggccagcggtgacgtggtcctgttcgacgtgggttgccgcaagggcgagtactgctccgacatgacgcgcaccttcgtgttcggcgagcccagcgaaaaactgcgcgaggtgcacgacaccgtgcggcgcgcgaacgaggcggcgcgcaagctggtagctcccggcgtgcgcttctgcgacatcgacgccgcagcgcgctcaatcatcgaagaggcgggctacggctcctacttcacgcatcgcctgggacaccagatcggcctcgacgtgcacgagcccggcgacgtatcggccacgcatgatgcgccggtgcaggcgggcatggtgttctccatcgaaccgggcatctacctgcccggcgagttcggcgtgcgcatcgaggacctcgtgctggtcaccgaagacggctgcgaagtgctcaacaactacccccgcgagctggtttcgatcggctagcgcaaagaagccgccggggtggtttctccgacgcgaatgcgggcgtttcgcatgaaacgcccgcgagttgcttgcaggttgcaggttaatatgagccggaaagtcatggacaaaacggggcacttttcagtattctctgccgaggatgaagccaacgaaagctttctcacctggcatttcttcgaagcgtcttgaccaagcactccgattcgctgctgaaaactaccgaaaagtggcatgttttgtccatgatgattttatcatatacatgaatggcgaagcttgcagctcctttgacgccgagcgccggctaacagggctacgctcagatgctgggaatgaaggcgcccacaccgcgccagaggctgggtgcttgcgttgatttgggaggttatccgcgcttcatgccgcttctcctggcggcggctttcgcatcgtgcaggcgcttgcagtcggggcagatggacgtgagcgcgcgggcgcgggcggcatcggcgtgctcctcctgctcgagcagctcgttcgcgaacgccacctccttgttcgtagcgtagtagcggccgcacgactcgcattcggccaacgcgaacaggcagcgcttgggcggctccgggtcgtcggcgaaccccgcgccctcgatgaggcccatcgcgccggtggggcaaacgggcacgcagcgaccgcactgcgtgcaatcgtacaggtcgagcgtccacaccagcaggccttcgtcctcgtcgatgaagatgcggatagcgcccgcatcgcatgccaccgcgcaggctgcgcaagcgatgcagcgctcgaagtcgtggcgaggctttcctttgaccggctcgtggacgcggcgcgccgacgaagcgggccgtcccgccgagatggcgttcggcacgcgcggcttgatcgtccccatcaggcatccccttccccgtcgaacaacgcatcgacccgaacggccaggtcagctcccaaagcgccgcgcatggcgatgtcggtcatctcgatggcctcgatgcgtcgcgtgcgacccaaagcctccagcatgccctcgtccaccagcgcgagcgccttcgtagggcaggcctccacgcaacgcgggccgttcggagacttcgcgcacaggtcgcacatcaccaccgacgtgtaggcgcccgtctccttctggcgcagcaacccggccgagcgcgccgacgaagcgcggctgtacggcgccgccttgacgtgcgcggtcgagggcgccgacgggtacaccgccccgaacgggcacacgagcgcgcacagcaaacaccctgtgcagcggctttcgtccacgtgcaggcgatcgcgctcctgcacgatggctccctcggggcacaccgtcatgcaaggcgcgccttcgcactgatggcacgtcacggcggccgacaccgtgcgcgtcttcacgagcgagatgcgcgaggcgggccgcagggcgcggcggcgatggctttccgtgcaggtgacgcgacaggcgctgcagccgatgcaccgcgacgggtcggacacgacgaagcggttcatacgagcgtctcttcctcgccgttcgcgtacagcgcgcggcccgccacctcggcctcgtgcggcgcgaacgcgcggggcggctcggcggcggcaaccgatgaggcgcctgccgcccccgaaactcctcctgctgacgccgcgcgggatccttcgactccggcggcttcgccgccttcgatcgctccgcccggaacggcgggaacgacatcggccacttcgctcgaagcggccgaaatctcggtctcgggctgcgggttttgccggtcggcctcagctgccagctgcgccttcagctcggcgtagcgctccacaaggtacgtttcggcccacgcctgatcgggaatggccttcacctggcaggcgctgtacttgtcttcgggcgtgcccgattcgccgtcggtggcgtgcagggtcagctcgttgcacttgccgatccaccactggtaggtcatgtacacggcgccgtcgttgatgcgctcgtccaccgccgcgcgcgccagcaccttgccacggcgcgacgcgacccacacgagctgctcctcgtcgataccgcgcgcgtcggcgtcgaccgggctgatgctcacgtagcccggctcgtcggccagcgctgccagcgctttgcagttgccggtcatcgaacggcacgagtagtgacccacctcgcgcaccgtgcacagcacgagcggatagcgctcgtcgggctgctcggtgggcggacgccacgcagccgcctcgaggcgaccctttccgtcgggcgtggtgaagacgccgcccgcgaacagctcggccgtgccgtggttgtcgggatcgtccgcggcctcggcgaagatgggccactgagcgtagcccgtgccggccatcttctcgtacgtcgcaccggcgaactgggggcataggctgcgcacttcgtcccagatttcctgggtgtcgcggtagtgcatcggatagcccatgcgcgtggacaggtcggcgaaaatctgccagtcgtggcggcactcgcccttcggcggcagcgcggcggtggtgcgctggaacgagcggtccgacgcggtgtacacggcgtcgtgctcggcccacgacgtggcgggcagcaccacgtcggccagcgccgtggtctgggtcatgaagatgtcctggctgatcagcaggtcgaggccttccagcgtggcgcgcatctgcgccgtgtcgggctcggtttgcagcgggtcttcgccgaagttgtagaacgcgcggatcgtgccctcggccacgccgtgcggcaggtcggtgagtttgaaaccctccttgagcgacaggcgttcctcgtcgacgccccaggccgctgcgaacttcgcgcgcaccgcagggtcgctcacgcgctggtagccgggatacaggctgggccacatgcccatgtcgcagctgccttgcacgttgttctggccgcgcaccggcgcaagcccgctcgcatgcgtgccgatatgcccggcgatcatggccaacgccgcgatggcgcgcacggtctgcacgccttgcgcctgctgtgtcacgcccatcccccagccgatgacagccgtatcggcgttggcgtagcggcgcgccgcctggcggatggtttcggacggaagacccgtgacctcttccacatcctcgggcgcgtagtcctgcacgacctcccaccaggcatcgaagcccgtcgtatgctcgtcgatgaagtcccagtcggcaagctcctcgtcgatgatcgtgtacgcgaacgcgttcagcaacgccaggttcgacccgttcttcagcggcaggtacatatccgcgatgcgtgccgactcgatgacgcgcggatcgcacacgatgagatcggccccgcgctccttcgcgttcacgatacggcgcgccactattggatggctggccgccgggttatagccgaacagcaagatgcagtccgtctcctccaacgtggggatgctcacgctcatggcacccgatccgacgacttccatgagcccgatgacgctggccgcatgacaggtgcgcgcgcagttgtcgatgttgttcgtgcccagacaggcgcgcgtgaacttctgcatcacgtagttggcctcgttgcccgcgccgcgcgacgaaccggtgagcatcacggattccgcgccatgctcctcaattatggcgcggagccgctcggccgtgaaatcgagcgcctcgtcccaggtgacgcgctcgagcggcgcgcctttcgtgcggcggatcataggatggtagatgcgcggcgtgaggattttcgtgtcgttgacgaaatcgtagccgtacatgcccttcaggcacagctcgccttcgttcgtgatgccgggaagaccttccgcgtcgatgatccggccgttctccaccacgaggttcatcttgcagccggcgccgcagtacgggcacaccgccatatgcttttccatgagcctactccccctcgtccagatccgcgttgagcttcatgctggcgaacgatgcggacgctcgcgccgccgccttgcgcttgttctgccgcgcgcgctccatgaactgcgcatcgatgagccgcaacgccttggtgggacacgccgccgcgcacgccgggccgccggcgcgatcgaggcacaggtcgcacttcaccacggtcgacttcgtgcgcttgcgcttcttcgcgcgagcccgcgcgcgggcgcccttgtcatcctgagcggaggccgccgcagcctcggtgccggacgcggcttccggttcgggcggcagcttttcggttacgatttccaccgcgccgtacgggcaggccagcacgcagttgcgacagccgatgcacttgtccggatgcacgcccacatgctcgtcgtcggtgaacaggcaccccgtggggcacgcgtccacgcacggggcctcggcgcaatggtggcagccgacaggcgccgagatggtgcgcgtggtgaccagcgtgaggcgcggaacggccacgtcgttcggcacatcgtggcgatgaaaacacgcagccatgcacgtcttacagccgatgcaggtagcaggatcggcaatgacgaacttgcggcccatcggggaagaggctcgcaccgtctagcgcctcccggtgcgcgcggccagcgccgcttcggcagcggccaccgtatgcgccatcgtcaccgacgtggtgaccgtgccgatgccgcccggcaccggcgtgatggccgccaccaccggctcgacctcggcgaagtccacgtcgccgcacaggtttccctgcgtgtcgaagttgatgcccacgtcaagtaccgtctgacccgggccgaagaactgtgcgccgaacgtccgagcgcgaccggtggcgcagatgaccacgtcggccgaacgcatgatgtcggctaggttctcggtcttgctgtgacagatggtcacgctagcgttgcggcgtagcagcatcatggacacgggcttgcccacgacgaggctgcgtcccaccaccacgacgtgcttgccctggagcggcacctggtaatgatcgagcagctgaatgcacgcggccgccgtcgcgggcgggtagcccgcgtggccgtcggtgaacaccgaggccagcgatgccagcgtgatgccgtcgatatccttcttcggatcgagcagctcgcacacgtgcgactcgtccacgaacgacggcagcggccggaacaacaggcagccgtgcacgttttcgtcgcggttcacctcgtggattgccgcctctatggccgcttggggggcgaactcgtccaactcgtacggcctgatggcgatgccgagcgattcggcacgtttacgggccgtgcgttcgtaggacaggtcgtcgggacgctggcccacgcgcacgagcgcgagcgcgggcacgaccttcgcgcggccgagcgcctcgatgcgcgcgcgtagatcgagcgccatgctgtcgacaacgggcttccccttcagtagctcagccatgtctgcctttctggttcgcgtcgtgaaactggcgatgttaccgtatcgcgtccatggtgtaggcgagaattccgtcggcgcgctcgttcgcctcggcgatgagccgatcggcttcggcgcgatagcgatcggcgcgcgcttcgtcgtccatcgaggccgcgttgatgtagacgttcatgctggccgccaccacggccgcctgcgccagcactgccgccgcgcccgcgtccgaaacggccagcttgctgccgttatgcgcgagaaagtcggcatggtcgatgacctcggcgcacgtacgcatgatgatcagcggcacgtcgcacgcgggtcccagcgccagctgcagcgccgcctgcttcgccgccgcctcctcgggcgtggccttcggcatgcggtacgacgcagccagaggctcgaacgcctgcgcgtccgactcgatgagcgcgagcagcttgttccgcagaagcgcgagccgttcgagggttgcgcgcacgtcgtcttccaccgctgcgtacgtcttcttgcccacggtcagattgcccaccatggacgcgagcgcggatgccacggctcccacgtaggatgccgcgccgcccccgccgggcgtgggagccgcgctcgccagttcgtcgataaaggtggtgtccaagaagatcctcctcgtcgccgcgcttattggtacctgcatgatacgacaagccgaccgaaacgcgcggaatcctgagataatccgcacgcttcggtcggcaaccaccgcttggacggtcagccctcttgctacacgctaaacggaacgggatcctgatgctcggggaaatcgatttgggagatcatctccgatgtgattccaaccgattccagcgttaccgtttcaggtgcgggaggaggctcgggaggttcgccgggaaaggaagggcccgggtcgaagacttctacggcttcactcgaatgaggcgtcacgtacagcgcgccggaagaatcgcaaggctgcaagagcgcacaggtgccaggatcgctcagcatgttctgaacaacctcgagcccgacgttcgacatggtggtaccaccagtaacggcaccgggatcgcacttatagatcccgaacaacgccaccaccttgccgttggagtagaccgcgtatccttcgttctcatcgcgcactacgtctccgttttggcgcgcgctatacattgggattacctggctgagcgcgaggttgtcgaagtcgatgtcatctgcgaattgcagcgcgcccgtatagacctcgccacttttcacttgggacatgtgcatcttcgcaatatccagaacttcctgctgcttgaagaacttctttaccggattgtccgaaagcgcaatgccgacaaggacgaccgcgagaaagagggcgaaagcgaccgcaaagaccgctttcgcaccgttgctaacaggtttcatatccttcgacccctttcacggatctagcgcgaaacagacgcggatctagcgcgaattctcagggagggaaccagggagaagctgagatagcaaagcccgggcgtgaacccgggctcccacattaacctgcgccgcccaaaggggattgtgtagcgtcctagtctcacatcctgggcaccgccggtaggcgtagcatacgacaggagcgcccccgatttcaaccgaaatcgggggcgctccaagcttagaacaggccggagatcttgccggtttcgtcgacgtcaatgcgctcggcggcgggcaccttcggcagacccggcatggtcatgatgtcgccggtcagcgccaccacgaagccggcgccggccgacaccttcgcgttgcgcaccgtgatgcggaagccgcgcggcgcgcccagcttcttctgatcgtccgagaagctgtactgcgtcttcgccatgcacaccggcatgccgccgaagcccaggtcctcgagcttcttgagctcggccatggccttcggctcgaagtccacgccgtcggcatggtacacgcgcgtggcgatggcctcgatcttctcggccagcgacaggtcgtcaccgtaggcgaactggaagtcgttcggctcttcgcacaggcgcaccacttcgtcggccagggccaggccgccctcgccgcccttcgcccacacctcggacagcgccacgttcacgcccagctcgcggcacttgtcctccaccagcttgagctcggcttccgtgtccgtggggaagcggttgatggccacgacgcacggcagctggtacaccttcgtgatgttctccacgtgctgcagcagattcggcagacccgcctccaacgcctcgaggttctcgtcgttgagatcggccttcgccacgccgccgtggttcttcagcgcgcgcaccgtggccacgacgaccaccgcgtctgggttgaggcccgcgaggcggcacttgatgtcgaggaacttctccgcgcccaagtcggcgccgaagccggcctccgtcacgcagtagtcgcccagcgccatggccatgcgcgtggccatgatggagttgcagccgtgcgcgatgttggcgaaggggccgccgtgcacgaacgccggcgtgccttccagcgtctgcacgaggttcggcttgagggcgtccttcagcagcgcggccatggcgccctgcgccttgaggtcgccggccgtgacgggcttgtcgtcgcgcgtgtagcccacgacgatgcgggccaggcgctctttgaggtcggtgatggaggtggacaggcagaagatggccatgatctcgctggccaccgtgatgtcgaagccgtcctcgcgcggcacgccgtgggccttgccgcccatgccgtccaccacgttgcgcagctggcggtcgttcatgtcaaccacgcgcttccaggtgatcttgcgcacgtcgatgcccagctcgttgccctgctggatgtggttgtccagcatggcggccaggaggttgttggcggcgccgatggcgtggaagtcgccggtgaagtgcaggttgatgtcctccatagggatgacctgggcgtatccgccgcctgcagcgccgcccttcacgccgaacacggggcccaggctgggctcgcgcagcgcaacgaccacgttcttgccctggcgagccagcgcgtcggccaagcccaccgtcgtggtggtcttgccctcgccggcgggcgtcgggttgatggccgtcaccaggatgagcttgccgggcgcgtgctcctcgtcggtgagcaggttgtagtccaccttcgccttgttcgtaccgtacagctcgagatacgactccggcacgcccgccttctcggcgatcgcgctgatgtgctggggtttcgtcgcctgggcaatttcaatgtcgctcaacacgtcgggcccttcctttcgttcccgcccgctcattgcagacggcgcggcttttctgatagaagcattctacccgccgaacgcaacgggaacgagaagcattcctccaacagcgcaagaaagccaacgttgcggcaaataggccgcgacgcatgaagctccgtcgggccacatcgaacccgccgtcgcaccgaaccctacgagacgaccccgcgtcaatgatggtctgaagcagctgcgtcggcgaaacggctcggcgcgaaacagggtagggcaacgcatcgcgcgccttaaacgctggcggcgccttcctgcgcttcgtacacgagacgcaatccctcgagggtcaactcggggttgatggcggtgatggtctgcgactgggccgccacgcgcgaggccaggccgcccgtcgccaccacaggagtctcgtagcccagctgcgcgaagatgcggcggatgatgccgtccacgcgatcggcctcgccgtacacgatgcccgcctggatggcctcttccgtgttgcgcccgatggcagtatgagggtcgatcaagtcgatggcgcccagcttcgtggcgtgcgagaacagcgcagaagccgacgtttccacgcccggcgcgatgacgccgccgatgaagcgcccgtccgcgtcgacgacttccatgttggtggccgtgccgaaatccaccacgatcacgggggcgccgtacagcgccttcgcggccacggcgtcggccacgcggtcggccccgatttcatgagggttgggatagtcggcctcgaacagcgcgcccgccgtctccgccgagcacacgagcgcgtccttcccgatcatgcgatacgcggccgcgcaccatgccatggtgagcgcgggcaccaccgaggccagcgccacgccgcgaacatcatcgagcttcaagccctcggacgccagcaacggcaccagtttcacacggagctcgtcggaggtatggcttttgttcgtggccacacgccaccgatattgcaggctcccgtcctggtagatccccactacggtttgcgtatttcccacgtcgatggcaagtaacatgttcctgacagtctccctcggtcgcaccccgaatgcttatagttgctctcgacattataacaacccgcccacgcgcatctgtcaggcaccggcaacgggagtccatctgatagaaaggcaacacatgaacgacaccccgcatcgcattctcgttgttgacgacgagccctccattaccgaattcgtcagttacgccctcaagaaggaggggttcttcaccgacgtggtggacaacggcgaagacgcgctggcgttggccacgaagaactcgtacgatctgttcgtgctcgacatcatgctgcccggcatggacggctacgagctgtgccgccgcctgcgctcgaagacgaccgtacccgtgttgttcctgtcggctcgcgacaccgagctggacaaggtggtgggcctggaaatcggcggcgatgactacttggcgaagcccttcggcgtgcgagagctcatcgcacgcgtccgcgccctgctgcgccgcggatcgggcggcgacttccccggcgctaaccacgccgtcaccgccagcggtatcacgcttgacgaggacgcccacacggcgtcgggcgcgaacggcgagatcgacctcacaccgcgcgagttcgagttgcttgccagcctcatgaagaacgccggcaaggtggtttcgcgcgaagatctgctgcgcgacgcctggggttgggaatacttgacggaaaccaagaccgtcgacacccacatcaagcgtctgcgtgataagattgagtccgccgggtacgatcccggcttggtggaaacggttcgcggctacggatacaggttcaagcaataaaaagactgcaaacatacttctcgctgctggcaacgctgctttcgcttctcgccggcgcggttctggttctgatttgcttcctcgccttcgacactccgtcgaaggcgtttttgctgcttgctcccgtcggtcttgtggtgttcacgttcagccttattatcggacatttcatatctgaaccgctacgcctcttggcaaagaaaaccgccgcctatcgcacgggaaccgatgtgccgttcgaacccgacggccgcctgtacgaggccgaccaactgtcggccgatttcaaggcgctcgtgcagaccacgaagtcgcagcagcacgacctggtgctgaaggagcgccgccaagcagcattcatcagcgatgtggcgcacgagctgcgcaccccgctcactgccatccgcggcaacgccgagatgctggaagatccggatctaccgcccgagctgcacgagaagttctgctcgatcatcatcgccgaaagcgagcgcctgagccgtcttacccacgacttgctgacgctgcagcgcatcgacgacaacgccatgcccatggagctatcgcgcgtgaacctgcgcgagctggccaccggcgtgctcgacgccctggagcccattctgcgcgaccgccatgcgaacaccgagatcgtcggcgaggcgcccgacgtgctgggcgaccccgatcgcctcaagcaggccgtgacgaacctcgtggagaacgcgagccgcttcatcgaaccggacggccacatcaccatcgagctgttcggcctgaagggcaactccatcctggccgtgaaggacgacggcaccgggttcggcgacatcgacccccagctgctgttcgaccgcttctaccgcaccgatgcgtcacgaagccgaggcacgggcggcacggggctggggctggccatcgtgaaatcggtggtggaatcgcacgatggcacggtggaagccatcaacctgcctgatggaggggcgtgcttcatcatcgcgctaccgtccatcctgcccggcgaacgctagcatcctcaaacacgcaaatccgggatcgcccgatcgcgatcccggatttgatagcgagcgcgcatgccgctcgcgactctgaaagccaacgcctagtgcgcggcggtatgcgcatgacccttcccgccgcggaacagcacgaacgccagcacggcaaccaccacgacgctggtgccgatggcgcacaccgcctgcagatggatcatcgggatacccaccagcatgccgatgatgtacgggacgagccacgcaagccacacgaacgtgctgaacgtgtggaatcgatgcatcccccgctcgttatgacgcacgtacgtgaccgtggcccaaacggcatgcacgagcatcagcacgatagcaagcagaccggtgaccgcgtggatcccgaatcctcctgcggacgattgctgcgcgatgttcgacatgatcatcgtgccggtggtatcgcacacgaggccgccccaaaacagcagcacatggcgcagcgacaacgttcccgaacgacgctccccgaacactccgaaggtgtacagaaccagcgcgcaggtgatggcgacactcgccacgatcaattcgatgctcatcgttgcgctcctttcttctttgctaatatgaactaagttcattaatgaacaacgttcatattagagaggcctgcgctcggaggcaatgacggacgaaaatcaaccaccatttcttcacgagctacgcatgagtcttcctctacaatgagggaaacgaccggatcccgagcttccgcacgcgggaggtgcgcatgggcaacaaacccgtcatcagcaaacagcagatcctcgacaccgccttcgcgattgccagcgaatcgggtctttccgggctgagcatccgcgaggtcgcgcgcgcatgcaatgtagccgtgggcaccgtgtacaactcctaccccaccaaatacgacctggtcaacgacgtggtaggacgattctggaacgaagcgctggccgacagcatgcccggagccattgccggcgatgacttcatcggcttctgcgaggggcttgcgctccagctgtcgggagcgctggcgaggttccgcgacgactggctgacggaagtcgccgcgctcgacgcgaagggcttggcatcggcgcgcaagcgcgaggaggcgtgcttcgcgcacatccgccgcggcctcgtggtggcgctcgaacgcgatccgaacgtggcgcacgaccgcctgctgggagcgctggcccccgaaccgctgtgcgcgttcgtctggggcagcatgctttcgtccatcaagcgaggcgaccctcgatgcgaaaccctgttcgccctgttgcgccgcacgctgtacgagcccccattcgcatgagataatgcaacaatacgaaaggaggccaacatgctcgatatagccaccatctccgaaagcgtgaacaatgccgcgcatgaatttccgatcaaaagggtcgaccttttcggatcgtatgcggaagaacgtcagaccgaaaaaagcgacgtcgatctattaatcgaattcacctcgatagccgtttcgctcctcctgcttgcatcgctgcgcgatcggctggagaaggatcttggcacatcggtcgacatcgtgcatgcgcccattcccgatggctctatattggatgtgggaaaaacggtaacgctctatgaacaatagagatcgaaccgtcgtcggcaaagtgctcgacgaaatagccatcgccgaatcgctcatgcagaacgaggatctcgcttcattcctcgaagatgagaagctcaagcgtgccgtatgcatgacggttatcaacataggggaactcgttaaaaatcttaccgagagctttcgccttatacacgcccaggtgccctggaaagccattgccggctttcgcgacatagctgcgcacaagtatcaaacgttgcgcatggaagacgtatacgcaaccgtctcggacgactttccgtcgcttcgcacgatgctagaagccatactggaaaacgaatagcgatcacattcagtcccctgccatcccgggaaaaggacgacaggggaccactttcgctacaatgggaggctaacgggtcgtttagagagctgcgagcacggggagcactttctccaggtcggctacgaggccgaggtcgcagtgcttcatgatcggagcgttcttgtccttgttgacggccaccacgaactgcgattccgccatgcccacggtgtgctgcacctggcccgacacgccgaggccgatgtacacgtcgggcttcacgacggcacccgaaacgcccaggtagcgaccgtgcgccatccaaccctcgccctcggcgatggggcgcgtgcaagccgtctcgccgccgatgcgcgccgcgtactcctgcgccttgcctaggttctgcttgttctggatgccgcggcccacgcacaccacgaccttcgcggagccgaggtcgaccacctcctcctgcttctcctggcgcccgaccagcttgatgggaccgggctcgatcgacgccgccgcgcgctccaccgtgccggcagccggcgcttcgtcgatctcgaacacgccggagcccacgagcacgatcgccatcccccgcgcatgctcgacgcgctcggccgcaccgccgtacgccatgtgcgccgcctcgacgccctcgtcgtcaagcttcacgcgcgacgcgtcggtgaccaccggcacgcccagacgcacggcaaggcggcccgccacgcactgcgtgcgcttcgacatgcgcgccaggatcaacgtcggctgctcggcttggacgacctcctggaacgcgggaacgcagtcctcgtacagcgcaccctcgggaacggcgccgacgtgcatcacgcgcgcaccccacgccgcgatgcgctgcgcgtcggcctcgtcgccggcccacagcgcaaccggcctccctcccagcgcccgcgccccgctgcacagctcctcgtacgcttccgccgtgtcggcgaacaccgcaatcgtcttatcgctcatggatgcctccttacagccgctcgcgcacgcgtgccgcgaacgcctggatcgtctcgtcgtcatcgccttcgaggatctcgcacgcgcgatcgcgctgctcgggcgcaagcgtgctcaccacgtcgatggcctcgtcaaagccgtcgaagcccacatcttcgaaggaaagaacgcgcgagggcttcttgcccgcgcccaggatgtccttcatcgaggggatgcgcggggtgttcatgtcggcgaccaccgacagcacggccggaagcggcacgtcgaggcgctcgaccaccgcgcccaccgtgcgctcgacatgcgcgacgccgtcgtcgagctcgatggagctgacggcgttgacggtaggaagccccagcagctcgcccagctgcacgcctacctgctgcgcatagcggtcggccgacccctcgccgcacagcaccaagctcacgtcgtccagctgcttgacggccgctgcgagcacccgcgccgtcaccgccgatccggcctcgggcagcgacgcgtctttcaccgccacgttctcgtgcggcccgcgcgcgaggatggctttcttcaacttcgagtcctccaccggatcgcccccggcggtcaggctgacaagcgacgcgccggaagccgacgccagctgcgcgccggcttccacggcgttgaggtcgtaatcgccgattttgagcgcagcgcgctcgaacgacagcgtgcgatcggcctgcacgaccgcgtcctgctcgtcgggcacgatcttgtagcacacaacgatgttcatgaatcactccttttgcttctcgggaatgcggttccgcaccttcgaaaagcaaaaagcgtgccagcctgcccaagcgctctagaacgcgtcgtccatgctttcaagcaccacgcgaacgcgcaggtgaaggcggttgagcagctcggagagctcctcgtgcgtcaatccgagctgccgccccaccgccgcgaggtcgccttcgtgctgcgcgagcagcgcctgcacgagatggcgctcctccgacaccgcatcgtcctcgacgccctcccgcatcgcccccgcatcctgctgcacggccacggcggcgtgtgccaccgggccgtccggcatggcgttcgccgcgttcgcgatatgaggcggcagcgagtccgcggcgacgttggcgccctggccctgcatgatcaggcagcgctcaacgatgttgcgcagttcgcgcacgttgcccggccagctgtaagcctgcagcgcctcgatggtttcggcggggaagggcgtgcacggcacctcgagcaccgaggaaagctgcccgttgaaataatccaccagcggcgggatgtcggcggagcgccgccgcagctgaggcaggcggatctccacgaggctcaaacggtagtacaggtcgctgcggaacttcttctcggagatcaggcgctcgatgttctggttcgtcgcggcgatcacgcgcacgtcgagcgtcttcgcggtattcgatcccagcttcgtgacgctctgctcttgcagcacgcgcagcaggctcacctgcatgtcaaccggcatctcgccgatctcgtcgaggaacagcgtgccgccgtccgcgaactcgaacttccccaccgcgcccgtctcgcgcgccccggtgaacgccccgccctcgtagccgaacagctcggtggccagcaggtcgcgcggcagggcgccgcagttgatggccacgaactcgccggtgcgtccgctgcgacgatgcagcgcgcgggccaccacttccttgccggtgcccgtctcgcccaacagcagcacgttcgtcttgatgggcgcgaccttctgcaccatgcggtcgatcttcttccattcttcggtttccccgatataatccaccttatcgccggtcggcatgactgcggcatcgctgcgacgcccggtcgcgctgcgggcgttgcgctcggcttcgttgccgtcttcgaatacgagcatgacgaacggctcctgcccttcgatctccaccctgccgcgcctcacgaggttgagctcgtgcaccgcgcgcgagcgtcccttcttgaatcgcacgggcagcggcgcttccaacttctccggcagatcgagcacgtcctgcacggagaagtccttccccagataggcgccgagcgattgtgagccgtacgaatactgctcccagcccgggcaatacgcgcgcatgcccgcgttgccgcccaggatgcggccgttggagtcgatcagcaacaccggatgctcgtaggccagcataagcggcttgaagaagtcgaccgtcgacagcaaagcgcccgccttcgcgccggcgcgatgcaagtcgttcgtcaacgaaacgccgatacggcacagctgaagggcgctttgcggcaatacggcaaacgggctgttgatgttcatcgcgccgtagtacttccctgcgccatcgaggtagggcactgacacgcccgagtacgtttgcacgatggcgcgatagtgctcgaacccgtcgacgcgcaccggcttcttctcgtaggcgactagagtggcgtttccggtgcccacctcctcttcgcgcgtgaacgtgccgaacgtgcgcgggtacaccgccaaaggcgacagaagctcgaacacgaagttctcgccgtccatcaacgacacgttgcagcccagcatttccttcaggaacttcatcaccggcaccgtcgatttgagcgatgccgcaaaacgttgccgcttctcttccagcagagcaaggttctgctcggtgaaatcgctcgaccacgggttcacgccggcggcgcggcatcgaagccacgagcgagctatttcgggacgcaccttgtcttcgagtatggcgcccgtgctgacgaacgtcttccaggcctctatcgcgtgttcttttcgatacaccacgtacgctcccctccgtttcgatcgagtaccttaccgccttcgttgcgactgccggcctatgcccagcgcctcgcggtacttcgccacggtccgccgtttgatgtccacgccttcgccgttcaggatggcggtgatcgtcgcatcgctcaaaggcgtgcggcgatcctcctgggctaccaggtctttgatgcggtctttgatggccagcgacgacagcgcatggcgccgctcctcggcggagcaggcgaccgagcttgagaagaagtgcttgagcggaaatacgccccacggggtgagagcgtacttgtcctgcaccgtgcggctgatggtggacacgtgcacgcccagcgcatcggcggcttgctgcatggtgagcggacgcatccgcgcctcaccgcccatgaagaaatcgtattggacctcggctagaaacacgccgaaccgatggagcgtctggcgccgctggtcgatgttcgccagcgccgcatccgcctcggcgcgcttctcgtgcaaccactcccgcgcctcgtcgtccatgcccccgcgctgcgccatgcggtcgtaggctccgttgagcaccagcgtttccgacagctcgccggtaacctgcaccgagaaggccgtgccatcgcgcctgatggtgatgtcggggatgacgtacacggtgcccttgcgctgcgagaaagacgagcccgggcgaggatcgagtgtgcagatgacctcgcggatggcggccaggtcgtcgatggtcaaatggtaggcgcgcatgagtttcgtcgtgcggttttcggcgaggtcgtccagcccggtgcgcagcatgtcgcgaataacgtccgcatagggaaggccgtcgtcgatttgcaacgcaaggcattcggccagatcgcgcgcgcccacgccgcgaggcgacagctgctgcacgagctcgagcagccgctggccgtcctctatcgagcgccctgcttcggcgcagagcgcatgcatgctgccggaaaagtacccgtcgtcgtcgatgttctcgatgagggcgtcaagcagagcgcgatcctcttcgccgacgcgcgcgcccgtcagctgcatgcgcacatggctgtgcagcgtttccgtttgagagcactcgtcgcgcagacgggccaggtcgaacccgcgggcatcccaagcgatcgccgacggcgggcgcgtatcgaacccttcggcagccgtttcggcatcggccgaagcgtcgccgtcctcgtcgggcagctcctcgaacgagagggagccgtgatcgtagtcgaaatcgagcaaggggttgcgctccaccaggtcgcggacgtacgcgtccaagcgcgcgaccggcagcgacagcacctcgaggccttggatggccgtgggagcgaaatgctgcttggtccgcaccgagacgttggagcgcgcctccatgcgcacggcttggctcggataatccgacatgcaacccccttgctgcgacgcgcttcggccgcttcccctcggcggctgcgcgatttcaccgacgagcggtgctgatgctctcattttaagatgattccgtgaaattttcaaccaattatgcgatattataaactctagcacgatttttgctaattgttttactaatctatggagaaagctcaggaaggaccccttcatgacgtgcgatccatcaacccccaccatacgcgaagctacccagcaggacgccgccgccatcgcgcgcctggccgaagacgccggcatgggcacgctcaccccgcgcggaacgtcgtacgtcgcgctggacggggaccgcatcgtcgggttcatccgcatcgtcgaagccgaaggcgatcggtacgtcagccccatcgtggtggacccgcaggcgcgcaggctgggcgtgggacgcgcgctcatgcaagacgctcgggcacgctacggcgcgctgctgttcgtcgcacgcggcccggcggttcctttctacacggcgctgggatgcgagcaggtggagcgcgagcgcatctcgcccgacctcggcgaagactgcgacacctgccccgatttcgccgcctgccgccccgtccccatgatctaccgctgagcgtcctgagggggggtcgcccccccctcaggacggttttgcgaacgacctagcgcgggttcttcgcttgcggcgcgggatcggcggggccggcgtaggtctgcacgatgcccgcgtaggtgcgcgcctcgtcgccgaccacttcgaggccggtgtccatccagttgcgacggcggatggccacgagcgcccagtccttcgccgagcccttgatgtagttctgatcgttcggctcgcccttcgtccacagctcgcccgacggaagcgtcagctccaggtacatcgggatctcgggatcgaacgcgagcccgttcacgttgtacatgttcggacggccctgccaagacaggaacagcgtggacgtgatgcgctccttgaccacagggtcgatgcccagcgcatcgtagaggtcgacgctgtgcgcccacagctccatgaggcgcgccgacgcgagcgagcgcacggacatgggcgggatgccggccgcccacggcacgcggcccttcgggcccagctccaggaaggaagccgtcatgagcgtgcgctgctcgcgccaccagttcaggatgtcggcgccgctttggtcgcgaaacgccatgacgtggtagtgctcgtcctgctcggatgccgcatcggccacggcgttcacgctctcgccgcgcccggccagcagctccaccgcgcagtagtcgaagaacgcgatgtggcatatgacgtccttgaacgtccaggtggtgcagtacgacgccatgcggttccagtcgtcctcggtgaagtccgccacgagggcgtcgaccagcgcctgctcggcgatgaggtcgtccacgggattgaagatttcaggcatgatgaagtcctttctattcctggaattgcttctggatcgctcggccggcgatgtggatcatgatctcgtcggtgccggctccgatgcggtagacgcgctggtcgcgccacaggcgcgagatgcggcagtccttcgtgtagccgatgccgcccatcacctgcagcgcggtgtcgcacacctcgaaggcggcgcggccgcagtacagcttcgccacggcggaatcgatctgcaccgactcgccgttgtcgatcttccaggccgtcttgtacacccagttgcgcatgttctcgatcttcaggtacatgtcggtgatgtgctcttggatgagctggttcttgccgatgggcttgccgaactggatgcgctgggtggcgtagcgcaccgcgtcctcgaaggcgcactgggccgcgccgagcgattgggcgcatgcgatgaggcgctccacctcgaagttcaccatggcctgcatgaagccgttgccctcgacgcccacgaggtccttctcctccagctccacgtcctgcatgtgcagctcgcaggtgttgcccatgttccagccgatcttctccaacggctcgatggagatgccctgagccaggttgccctcgtcgtcgtgcagcggcacccaccacatggagaagcgggagcggttggcgcgatcctcgggatcgtcgtcggcatcgcgcgccacgcatagcatgtacttggagttcacggcgttcgtcatgaacgatttgctgccgttcaggtacaccttgccgtcgcggcgctggtacgtgctggccagcgacgagctgtcggagcccgcgcccggctcggtgaagcccagcacgaaaccgggcttgcctgccatgacctcggcgaagcactgctcctgctgttcgggcgtgccgtactccgtcatgtccttgagcgcgcacaggttgccgtacacgtagatgggcgcgccgttcttgcagatgcgctcggacaccagcatgagcgtggtcacgtccaccggggtgccgccgaacttctcgtcgacgcccagcatctggaagccgttctccagcagcgcgtcggtgaactcctggggccacacgtgcttctcgtcgcactccttgaaatactgctcggtgccatagcgctccatgagctcgtcgacgctgtcgagcagcagctgctgctcatcggtcaagctgaaatccatctcgtcgttcctttccttcggttctccctagcgttgctccatgaaataccggtaggcatccccggcgcgctccctgcgcaccctgccttcgcccatcagatggtcgaggtgggccagcgtttcgcacacgacgatccaccgctggatgatgggtatctcctcccaagcggcatgcggaatgttccacgtgatggacttagcaagttccgtgccagtcatgccggggcgctcctcgagctgcgcggcgatctcgtcgagccgctgccgatgatgccgctgcagccaggcgatgcgctcgggcatggcctcggcctggcgccgcgggtcgacgaacccgtgccccatgcaggcgaactccacgggcagctgcgccaccttgtccaagctgcgcaggtagtcgcccagggaatccgcctcgccggggaacggcgccatgttgggcgagctgttcatcagcaggtggtcgccgtagaacatgaccttctgatcgggcaggtacaggcattggtggcccggcgtgtgccccggcgtgtcgacggcgcgcatccggtagccgccgtagcgcagctcgtccccgtcggccaggttcgcgaaacgctccggcatgggccactccacgcgcgggatgaggctggcgtcggtgcgttccagctcgtccagctcgtccggcggaaacccctcgcacgaaagccgcgccttcaccgtgccgcgatacgagctggcaccgcggccgcggaacagctcttcgtcgcgcgcgctcaggtatacacgcgtgtcttcgtgcgcgatggccgcgatcaggcccagatggtcgatgtggaagtgtgtggcgaacacgtcggtgcgcgccatgtcaacgcgcagatcctgcagcgccgagcgcagcacctcgtacgacgcctcatggctgacgccggtatcgaccagcaggttgcgctcgtcggtggcgatgaggtaggcgttcgtgtagccgatgggcgtgccgcccgagtagggcacctggatgaggtagatgtcgggatcgctgcgaagcttctcgtggtggcgcggcgcggcctgctccttgcgctcgtcgaagtacgccacgatatcctgcttgcgcaccttgcccgcgctgtcgcgcttcatgtcgtccatgaacaccacgtagcggggcttcttataactggaaatatggttcttgcagtgcgtttgcacctcggcggccgtgaggttcgagccctcgcgcggctggatgacggcggccacggcctcccccatcaccgggtcgctcgtgccgaacacgaggcagtcgtcgatggcggggtgcgtgcgcagcacgttctccacctcggcgacgaacacgttctcgccgcccgatttgatcatatccttcttgcgcgaccgcacgtagtagtacccatccgcatcgcgcatcatgaggtcgcccgtgcgcagccagccgtcgggcgtgaacgcctcgtcggtcaggtcgggctggccgtagtagccctgcatcaccgaccgcgaccggaacagagcctcccccacttcgccgtcgggcacctcgttgccgtcctcgtccaccaccttcatctccacgtgcttcatcggccgccccacgctctccagcaggggcgaatcggcctctaacatggcccgtgtgatcttcaggctgctgccggcgccgctttccgactgtccccagccgtagttgagcaccgcgttggggaacttgtcgtagatggcttggatgatgggcttcgtggtggctccggccgcgctttgcacgagccgcaccgagctgagatcgcactggtcgatggtggggcaccgcagaaggcgcaggtacgtggtaggcggcagcaagatcatgtacgtcacgcggtagaactcgatgaaatggaggatctgctcggcgttgaacgcctcgcagatgaccagcgtcgccccggccgcgaacgcgatggtgaaccagctgtggccgccgtggtgctccagcgggcactggatgagcaccacgttgtcgggatcgtcgccgatgccgttggaatccatgatggcgtcgagctccacgaggtcggctccgtgggtgcgtgcggctcctttcggcaggcccgtggagccgcccgtgtactggatgcgcgacaatgcgtcggggtagcggaacagcgggggctcggcggtgctgcggccggcgcgcgcccgctccagatcgagcgcgccggacacctccccgcctgcgctgaccagcgccacgtcggacgtgaacgattgcgccgcctcggcaaccgacgcggcgaactggctggcgaacacgagcacctcggccccgctggcattcaccagataggcgacctcgcgcgggatgagcttgtagttcagcggcacggccaccgccccgatcttctggacagcgtagtacagctcaaggagctcggggcagttcggcagcaggtaggccacgcgatcgcccggccgcacgcccaaatcgcaggtgagcacgccggccatctggttgatgcgatcgttcatggcgcggtaggtgatctcgcgtccgtcgaacacgacggccgttttatcgggatgcgcccgaacgctcgccaagaacggttccgctacgttgtactgggccatatcgtctcaccttcgcagggttcagcgggcaaatttctccatggtggcggcgtacgccttcgtggtcgtgcagaacggcgacgccgtcgattcggcttccaggcacgcttccaggttgccgtcggccagcgcgttcatgatgttcttcgtaaggtggatggacgcgtcgggcatccccgccagctggcgcgcgaaccacagcgtgtcggcttcgagcgtttccgtcgggaacacgcggttcaccacgccccagtcgtacagctggagcgcggggatcttgccgccgaagaacagcagctccttagcgcgctgcggccccaccaggtcgggcagcagcttcatcatgcccatctcgggcacgatgccgatctggcagaacgccggcacgaacagcgcgcgctcggacgcgcatacgaggtcggaggcgcacacgagcgcgaacgccccgcccacggcgtagccgtccaccatcgcgaccaccggcttcgacatcgtgcggatggtgcgaaccacggccaagtaccggcgcagcgtcttgcgcgcgccctcggggcccggttcgagggcgggcccctggtcgagatcgccgccgctcgagaaatcgtcgcccgcgccgcgcagcaccaccacgcgcacgccgtcgtcgacgtccgccgcgcgcagcagcgcgtccagcttggtcatcatctcgccggacagggcgttcttcttgcgcggctggttcagatagacgacctcgatgccgccttcgagacgctcggcgtacacgacgtcgcgctcgggagcgcaggcgaaggacgcgtcggatccgacggcttcggctgcttcgcttgggatgacgggtcgattgacgggtcgttcggttatgacactcactcgcgtttcctctcctacagcgcgcatgccgcgcgatagcccatcttcgtcgcgtcggcgatgcgccccggcgtctcgcaatcgcccacgaggtacacctcgtccacaagcggcttgcacgcctcgcccaaatcgtggttctcggcaagccccagcgtgatggccacggtcttggcggggatgaacagctccatgtcgccctccggcgtggtctgcacggccctcacgccctcctcggtgatggccgtgacgcgcgtgagcgggtacatctccacgttctccgcctgcttgaagctgctgatcagcccgaaacgatcggacccgcccacgtcgaagcccaccttcttgcgctcctcgatgatggcggtggtgcggcccgtctccatgcacaggtggccgaactcgcagcccggcaggccgccgccgatgatggcgacgttgcggctgatgggccacggcgacttctcggtcatcgtgcgcgcgaacgacggcgtgtagtacatgctgaggaacagcgaccccgcgccccacatgaagctgttgaacgcgcccctcttccctgcgggcttatggccgttgatcatctcgaggaagtcgtgcgacgagacgacgttcttgccgtcggcgcccggcacgtccaaccccaggggcttgccgcccacggcaacgatggccgcgtcgggcttggcctgccgcaccgtttcgggcgtgaccttcgtcttgagatgcacggtgatctggggatgctgcttcacctgcgtgaggaggtagtccaggtagcgctcgtggtaggggctgaagatgctgctcatcttcacgcacccgccgaggcgcggcccttcctcgtagaggtcgacggcgtgcccgcgctgcgccgcggtcagcgcggcgttgatgcccgccgggcccgagcccaccaccatgaccttcttgcgcttcgacgcctgcgggaacgcttcatggtcgagctcctcgcccaaacgcgggttgacgccgcagtagttgagcggcttgccctggctcaccacgtcgtccagacagcggcagcacacgatgcacaggcgcatgtcgcaggtgcggtcttccatcaccttgcggggcagcgccgggtcggcgatgctgtagcgcagcccggcgaccacgtccatcttgccgtcttggaggttctgctccatcacgcgcggatcggtgttgcgatacccctgcgccaccggtttcttcgccacggtcttgatctgctgcgagacgaacgtccagtggccgtcctcgatggccttcgtggtgagcggctcgctggtctcgtgccagcccacggaaaggtcgtgcaggtcgcagcccgcttcctccagcatgggggcgatgcgcagcgcatcctccatggacaggcccggacccgcggggctcttgatgaagtcgatgggcgaccagcgcacgacgatggggaacttaggtcccacgacctcgcgcacgccgcggatcacctcgagcgtcagcttcacgcggttctccaggctgccgccgtactcgtcggtgcggttgttggtggccagcgccatgaagcgcgacaggatgccgcccacgcccgccatgacctcgatggcgtcgaagccggcttccttgcacacgcgcgccgcgttgaagtactgctgcttgaacgcctcgatctgctcgagcgtcatggcgcgaaagccgcccatgaacttgaggatggcgatgtcggacgggccgtaggggccttccggcgtttcggcgtcgggcttccagtcgtgcacgtagtacggctgcgcgcagatgaggccgccgtgcttgtgcaccggctcgatcatgtagcgctgcaggtcggggatgcagctttcgtcgtagcagctgggaagctcgtggatgtgatcgggatcgatgtcgttgcgcttccacgggcagatggtctggatgatgagggccgtctgcccttcggcgcgctcctccaggtagttcgccaaacgctgcgtgggacggttgtccttggtcacgtatcccgcgcccggcgacatggacgtggtgatcatgcggttcttcaaggtgatgccgttcacctgcaacggcgatcccaggacggggtactgcgtgctcatgcgttcgaatcctctcttcgttcgtgtagatgccgatgcagcgtgcgggcgccgacaggggtggcggcgcccacgtcgcgatcgtgggtgacaggtgcgatgcctactttccgcggcgcttccaagctttctgcgacaccgccagcgtgacgggaaccagcacgacggccagcacgtacatgccgatgaccaggatgaagcacaggtcgaacgagcccgtggtgtcgtagatcatgccgtacaccaagaacgatacggccgttgcgatgaagatgcccgtggatacccagctgtagatttgcgagtagttgagcgatccgaaggccgcgcgcgccagcatgggcgcgatgaccgtgaggcccgcgtacccgccgccgaacaccaccatgcccgcgtagaacagggccacgttctcgcccgcgatgtaggccagcaggatgccgatggcgccgcacgatgcggcgatgatgcccgtgtacttcacgccgatcttgtcgttgagcgcgcccagcaccagcttgaacaccacgccgcccaccatgatgatggacacggccatggcgcctgcgctcgcgcccagcgcaccgtgcgcggcgaacgcggggatctgctggaagaaggcggcgcacatgacgaagatgcaggccacgaggatgagcaggtagaggccgggcgacttgatggcctgcgccaccgtggcgccctcgtcgggctcgggggctgcggactggttggccgcatcgtcttgctctcccgcgccgaacggaagcaggcccatgaccgtggggctcttgcgcacgaacgccaccgtcagcaccaccgacagcacggtggtcacgatggacagcgccgcgcgcgccgtctgccagccgaactggttgatcagctcctggccgatggggctggcaacggccgccaagatggacagcgtcgccgccgtgatgctgatggccaaacctgcgctcttcttgaaccaggcgttgatcagcaccggagccgccaggtacatgtagaacgccgacgtcacgccgtacaccacgccgtagaggttccactgccacagctcggtggcgtaggcgctcgcccacgatgccaggccgaaggccgccgaaaccgccgcgaggatccagcgcgggttgtacttctccatcagcttgccggctatcggcgcgcacacggcggccaccagcggctggatggtgcggtacatggtggtgtcggtttgcgtccagccgaactggtccatcaccggagccacgaaaatgcccgaggtgttgccgataatgccggttgggatggaatagaacccgatgcacccgataacgacgagccaagcccacacggctcctttggtacgcgcagtgcccatgtcctcatctccttgtctcaaatcccctgaaacttccgatgaaagacgtggagcaaataccgtgccaagctgacgcgatcatgggatggaacgagaccgggaaggtgccgcctcgctcgatggggcaaggggcgggactaccgtcttattcgatcggccgctcggaaaagcgaagggacgggggacaagacatcgatccccgtccctttgtcccgttcctcgtttagccgaaggggccgttctccttcttgaggagctgctcgtcgtagaggctggcgacatcgtcgggcgtggcgcccagctcttcgaggatgtcctcgttgtcggcgccgaccagcggcatgccgcgccaaatctgccccgggttgttcttcatgcgcggcaccacgttcacgccgcggatcgactcgtcgtcgtaggagttcttccactcggtgaagctttcgcgcgcctggtagtgcgggtcgcgctccgccatctcgtaggtgtagatgcggctgcacggcacgccggcttccagcatgagccgctcggcctcctcggcggtgtgcgatccgaagaacgcctccatcgcctcctccagcacgttgcccgcctcgcttccgaacgagatgaccggcgtgccctcggggaacagttcgctgccgtactcgaggccgaacagcggcagcgccgcgcgcaccacgccgggacccaggatgagcgtgtagatgggcacgccgtcctggcagatgtacgtgccgtagccggcgctcgacgtgctgtgcgaaccctcgcgcacaggcagcgcgcccgtgttcaggtagttcagcgcgtagaagccctcgcagcgcagcatggcctcgtactgagccacgtccacgctgtcgcccttgcccgtgcgctgcgcgttgatgtagccggccaacgcgccgatgctggccatgaagcccgcgtagtagtccgacacctggggaaacgcgagcaccggcaagcggtcgggatacccgttcatttccatgaagcacccgtaggcctggccgatgccgtcgaacgaggcgcgcgacacgtacgccgggtcgcccgtctggccgaagcccgagatgtgcgcgatggtcagcttcgggttgacctcccacagcgcctcgtcggtcatgccccacttcgccatctggccgccgcggaagccgtccacgaggatgtccgcctgcttcagcagctcgaagaaccaggcgcggcccgcgccgtccttcacgttcatgcacagcgagcgcgtgttgcggcgctccatctgcgtgccccagccctgcaacgcttggttcgtggggcgcgaggtgtcgcggccgcgcgggctttccacgccgatgacctcggcgcccaggtcggctagcaggctgcaggcgaacggcccggcgatggccatggtgaggttgaccaccttcaccccttgcagcggaccgaacttcgggcaatcttgagctttcatacggttcctccttctcgacagcgccgcctccgggcgactgcaaggttcacctgcaaatttgatgccaacatggcatgatatttgcgagtggttgatcgagacgtacccgaccgatgcagaaggagccgtcatggcgaacaaggattccgacgtctacaagaacttggtgcgcatcgaagagccggaggcgcgcatccacgtcgatgcgcccgacggcgtcctgcctttggcgctcaacgtggagctgcccggcggatacgtgtccgaagcggttcccagcggcgtgcgcctgcctcataccgcaaccgctatgttctccacggccgactcgttccagctggccgccgagttccacatcctcatgggaaaccgtccgctcgcctgcgacaacatcccgctgtgccgcatccgcgtgcgcaacatcaagtggagcggcgcaggcgtgccccaaatcgagcttcgcttcgatatcgacgaagcgggcatgctgaccgtatcggccgcgaacctcgaccgcagcaacgccgagatcgtcgtgttcacggccggagacgaagtggcccatgacgacgtccggcgggcgctggccgacgcggacgagcataaggccgacgaccaggccacgcgcgacctcatccagaagatgctcgattgctacgcgctcatcggcgcgacgaacgactattacagcgcggcgaagaagaagatggggcacggcgcgaaaagcgcgtacaagcaggcgcgcaagcgcctggaacaggccctgagcgtggacgtggccgatgcgaccgacgacacgacgaccgagttgcacgccgccgaagccgccttccgcgaccagcgccagcagatcctccccctctacaagcaggtcatggactggtaccggtaaggcgtccggcgcctcataaatcgggcatgcgagaacgtcctggaagggaatcccattccaggacgtttttccaattgtgagacttgagggtttttcgttgtgagacttgaggacttttcattgtgagacttgagggtttcgcatcatcctaagcaagcccagcggaagcattgtcgccccaaaaacacagaattgtcgacgaaaccgtgtttttggggcgacaatgttcgctacacgcccccgcaacgcaagcgggccgcccgagggcggcccgctgtgcgattcgcgtttgcggtcgagcttacttcttcgcccaggagcgacggcccatggggacgatcacgagcgagcagatgagcgtcaccacgtagaagccgatgatgaggtagaagcagccggcgaacgatccggtgatgtcgaagatctgcgcgtagatgagcgccgagaagccggagaacacgttgaggccggtggccaccatcgagaagatgttggcgtagtccttctggccgaacgcctggcggcacgccatgggcggcacgatgttgagcgcggcgaagccgatgccgaacaggaacacgcccacgtagaacatcatggcgttatcgacgctgaacagcacgatggcgatgccggcggcgccgaagatgctggcgaccacgccggagacgcgggcgcccgtatggtcgcacagccaccccagaccgaacttgccgaacagctggccgatcatgcacacggtcacgcccatggcgcccacggccgcgcccagcgcgccggtggaagcgtaggacgagaactgctgcatcatgccggcggcgatgacgaagaagcccgccatgacgatgagcagccacagcgccgggttcttgcgagcctgcgcggccgtagcgccttcgtcagcagcgacgtcgatgacggacttggcctcggacttcgcggacgcaacctcggcggcgccgtagccccagggcagcacgcccatcttctcgggagactcgcgcagcagcgcggcggtcagcacgacggacgcgatgagcgcgatcaagctgatgatgatacgggcggtatgccagccatagccgctgatccagccctggatgaccgggctcatgaacgcgcccagcagcgatgcgcacacgccgatgacgccgatgacggtgccgttgctcttagcgaaccaacggttgatgaacgtcggcgtggcgatgtacatccagaacgcggcggacgcgccgtacagcacgccgtacacgttccactgccacggctcggtaaaccaagcgcaggcaagcgatgccaagccgaaaacggcggccgcggcggtcatcacccagcgagggttgaacttggaaatgagcttgccggcgaacggcgtgcagatggccgccacccacggctggatggacatgtacagcgtcgcgtcggtgcgcgaccagccgaactcttccatgacgggcgatgcgaacaaaccggcctggttcgccacgacgcccaaggggatggcgtagaaggctacgcaggcgatggcgatcgcccatgcgtagttgctgcccttcattgtttcagttcccatagtgcctcctttgttttacctgagaatccccaacgccatagcgatatgcaaaatccgtgccatcgttagggcgccagagggttcccctctcttttctcgcggcggcacggcccctgctcgaacgcgccgggaccgcgccgtccgccgtcgagctactcgcccttgcgcagcacccccttctcgtacagcagctcgatctccttttccgaatagccgaattcctcgagcacgtcctgcgtgtcggcgtcgtacttcgcccctccgcgcacgatcttgccgggatgcttcttgaagcgcgggatcatgttcacctgcttgaccgtcttctgcgtgatctcgtcgtagcagtcgacgaacacctcgcgcgcctggtaatgcgggtcgttcagcatcatctcgtaggtcatatgggggctcaccgccacgcccatctggccgaagatgcggttgacctcctcaaccgtgtgcttctcgcaccagctgtccagcgcggcgcggaacttcgcagcgcggtcgggcagcggctcgtccaggctcttgcagccgggcttgcgcgtgatggaggggtaggtacccagcggctggaagtcgggatcgtcggcgaacccgaagaactcgacgagcttcttcaccgggccggcgccgcccacggctacctggcagtagccgtccttgcacttctgcgcgccggcgcacgcgcccacgaggtcttcgttgccgatgcgcatgggctgtatgccgtggttgatgccgtcggacagcgtggcgccctgcaggcgcacgagcgcctcgaactggcagcagtcgatggactcgccttcgcccgtctcgcgcgcgcggatgacagcggcaagcgtggcccaagcacccatgagaccggtcatgaagtcgccggtgaagggcttcgtcacgctgggcgggctgtcggggaagccgttgaggttcgaatagcccgagaacgcctggccgatggggtcgaacgacgccttgcgcacgtagtccgggtcgccccagttgccgaaaccggaaatatgcaagatgaccagcgcagggttcgcctcccacagcacctcgtcggtaaggccccacttctcccaggtaccgcccttcgacgactccaccagcacgtcggcccacttcaccatctgcagcaggatctccttgccctcgggcgaggggatgttcagcgtgatcatgcgctggttgcgacggtcgaccgaccatgcgtcgccgtacatgcggtacatgtcgggcgccaccgtgctttccagctcgatgacgtcggcgccttgctcggcgaacagctcgcagacgaacggcgccgcgatgaccgcgccggcgttgagcaccttcaagttctgcaagttgccgaacttggggcgatccgatgacttcatatgcgttcctccttgtgtcctgatcccgtatcgtgcgtcgtccgcgcggggcggggcgacaaccgtctctggccttcgacttagcaactagcgtgccaatctttcgctgccgctgttctcttcttacgccgccggcatcccgctatcctcgccccctaccctttgcttttacttttgtggattcctcgcgcgtcgactctcgacgggacgctttttcgtatgctgctggcaggaagacgacgaccggagggcgagcgacatgatcatcggcatcaccaccacgtacgttgaagaggagcagaaggacgagatcgtccccgtcgagcgcgtgacggtggaatacgtgcgacgagtggccgccgccggcgccgtgcccgtgctgctgccgcccgtggagggcggcgcggatgcgaaccgtcgagcggcgcgcgaactggtagaacgcctggacggcctggtgctggccggcggcggggacctcaacccggcgacgtacggcgacgaagcgcgcctggccgaaaccgtgaacgtgttcgatggacgcgatgccctggagctggagttggcgcgccttgcccacgagcgcgatctgcccacgctgggcatctgccgcggcatgcaggtgctcaacgtggcgctgggcggcgcgctgtaccaggacgtgcacgcctgcgggctcaccgacgcggcgcatcagcagaagcctccctacgacgtcgtgcgccagcgtgtcgacatcgcgccgggcagcgtgctggaccgggtgctgtgcgacggcgcgggcgagggcatggtaccaggctgcaagacgggatggcccgcatcgctcgaaacgagctgggagggcatcgcgcctgcgccgcattcgctgctggtgaacacgatgcaccaccaggcgatcgcctgcgtggccgacccgctgcaggtgagcgcggtcagcggcgacggtctggtcgagggtttggaggacccatcgcggcgcttctacctcggcgtgcagtggcatcctgagtacctcgacgacaacgccccgctgttcgaagccctggttgccgccgcgaagtagcacgcccgctcggcctcttgatagggcgagcgaaaaagtgggcgcaaaggggcagccatgacaatttcttcgtagctttcgaacgtcttgcactgaggcatcgacaatacgatcgctatatgcccaggtcggagaatcttgggaccattactgcatgagtttgccatggataacattgtcatgggtaccggttcgcgcccacgtcggcgcaccgcccatccatgcttggcacgcatcgcccgccctttgtgaaggtcgcttgggtttcgcacacgggatggcgggcgcttgctataatccatttagtttgattatcaaagcattgaaggcgcgcctcgaaagcgcggccaaggacggagcagcatgggcagcacgatcatcggatgcggaaagtccctcccgaagctggaagtggccaacgacgagctgaaagcgctcgtcgacacgaacgacgaatggatcagcacgcgcacgggcatcagatcgcgccacgttgccgtcgaggaaaccgctaccgatctggccgaagccgctgcccgccaagcgctgggtcttgccgacggcggctggcgcgagggcgacgaggccatcgaccccgcttccatcgacctcgtcatctacgccaccatcacgcccgacgtgctggtgccttcggccgccgggctgctgcgccgccgccttggtctcgagaacgccattgcgttcgacctgaacgccgcctgcacgggcttcgtgtacggcctgaccgtggccgagtgcatgatggccggttcgaccgccggagcgcccggtgccgcgggccgcaaccccgttcgccgcgcgctcgtggtgggagccgagcgcctgacgcgcgtgacgggctggagcgaccgcaacacctgcgtgctgttcggcgacggcgctggcgcggcggtgctggagtggaacgagaaccgacctggcatcatgagcagcttcatcacgaacgccgacgacgacacgaacgcgctcacctgctcgtttgcctacgacgccccgttgccgttcgacatcgacggcgcgtcgcccgaagcccccgaagacgcatcgctctcccgtatcgatgccgagctgggcattaccgaattcgtcgacgcgggcgaaccgcgccaggtattgcgcatggacggctccaaggtgttcaagttcgccgccgaggccatgaccacggccgtgcacgaggcgctcgaccgcgcaaacctcacgctggatgacgtcgcctgcatcgtgccccaccaggcgaacgagcgcatcatcaagtacgccgccaagaagctggggcgcccgatggatttcttccagctgtccatcgaccacactggcaacacgtcggccgccagcctgcctatggctctatgcgacgcgtacaacgccggccgcatcaggcgcggcgacaaggtggtgctcgtcgcattcggcggcggcttcacctccggcgcggtgctgctggaagcgtaaatcagcaagcgagcatggcagagggatgagatatcgaccacgtccctctgccatcgatcaccaaacgaaacgggcgcccgaaggcgcccgtttcgtttggtgatcgatgtttcctaccgcttgggcagagctcgaagcacagcgcgagcgcatagcacagcggccaccgccttcagcaagtcgggcacggcgaagggcgcgatggtcaccatgaaagctgccgccaaatcgacgcctaccacagcagcgtactggaagcatccgcacacgtacgtcacgatgatgaacgccaagcaggccaccatgtcgaccacgatcgccatcggacccgaaacccccttctcgcctatcgcacgcctcagaccctcgcgaacgagcagcgcaaccgccgcagccagcagaaatccccacaggtatccgcccgtcggtcccatcaacatgccgataccgccgcgcatgcctgagaacatcggcaaaccgatagctcctagcgccaggtagccggcgatagaagccatgcactgcttcggcgtgagcaccataattgcgaacatgaccgcgaacatctgcagcgtcagcatcaccggcccgatcgggatggacacccatgcggacacgcccaagagggcgatagtcaacgcgacgaacgcgatcgagcgcgtgcgcgatgtccccatagaaccctgtttcaccttgtttgcttccatgctccgctcctcttccaggacgatccttcgttttcagcagcctcgcactataagcaaaccccgcagttttgtgaaccgcggggtttaagcaagggtgacaatctggatgcgcgatacgagcggcttagaacttcgctttcagttctccgctctcgagcttcttcaagcgtcccatctctaagacgatgaacaccaccgtggtgaagatggccaggaagtcggccgcgggggtggcgaagtacagcgcgtcgaggctgacgaactgcgggaaccagctgggcagcaccatcggcagcacgatgagcagcggcaccaggaacagtatctggcgcgtcagcgacaagaagatggacttgagcggctgcccggttgcctggaagtaattcgagcccacgatctggaagccgatgaagggcagcatgagcagttgcaccttgagggcgaacaccgtgaagtcgcgcagcgattcgttcgtgatgccgaagaacccgacgatttgctcggggaatagatgcacgagcgcccacagcgccaaaccgatgcccgtcgccccgaagatgccgtaccatagcgtcttcttcacgcgctcgaacaggtgcgcgccgtagttgaagcccagcagcggttggatggcgatggacacgccgatcagcggcagcaccgcgaacatggccacgcgctgcaccacgccgatagacgcgagcgccccctcggcccccagcgggctcatggcgccgtacatgttcagcagattgttcagcacgaagttcaccacggccatgcccgcctgtacggcgaagctggccagacccagcgacagaatcagccgcaccgtgcgcagatgcagcggcaggtagtgcagatgcagcttcatgggcacgttcttcgtaacgatgaagtaccacagcaccgtggcgcacgagatggcctggccgcacaccgtggccagcgcgctgccctgcacgccccagcccagcaccatgacgaacaggaagttgaacaccgtgcacgataccgcgccgatgatcatggtgcccagcgcgcggttcggtgcgccggccgtacggatgaagttgttcacgcccatgccgatgcactggaacacgaagcccagcgagatgatctggatgaacgagcgagcgtactcccaatcctccgccgtggcgcccgacacgccgagcagcgcattgacgcaggcgggaatatgcatgagcacggccacgatcaccgcgaacacgagagacaagcacaccgtgttgcccaggctgcgctcggcctccacccggttgccctcgcccatgcgcagcgccgccagcgcgttgccgccgttgcccacgagcatggcgatagccatgaacaccgtcatgatgggcatggccaccgtggcggtggcaaggccgatctctcccatggcctgccccaggaagacggagtcgatgacgttgtacgcaccgttgaccagcatgcccaggatagaagggatggcgaattccacgataagccgcggaatggacgccgtacccatgcggctgactttatcgtcgcggcccgtgcgcttcggatctttgccgatcggcgctccggcacgttcttcactgaggtcgagagaggggttcgttgcttctgattccatgagttcgccgctgcctttcgagcttctccaatttcgaggaacggcacattgtaacccatcttttcgccgccgcacagcctggaaatcggatacaccgtaaagccgcaccgcgtatgctatattggagcaacatcgccacgttacatggagaacaggggaagcatgtaccggatgaaggaattctcggccatgacaggcctgccgcaatcgaagatccgtttctacgagaagcacggcttgattctctcggatcgtcaggaaaacggttaccgagtattcacccccgaagatgccttcaaatcaaacgcatttcgtgtgctgctgcaatacgggttcagcatcgatgaagcggtcgctatgctcgacgcgaaacaaggcacagaagagttcgagcggtcactgctgcatcaacaagaaaagctcatgcacgaagccgacctgatcgcgtaccgactaagacggcttgaaagcacccttggcgcgatacagtctgaacctggtttagagttcgaactggtggatgccgccgatcaggtgtacatcaactcttcatacggacgagacttccatgtctcgctcgagcacgagaaaacgatctcgcagtattacaaccttctgagcatcaccagctgtgcacgcatcatcaagcgagacgacctgctggacaaccgcccaacggtcaaccccgactatgtcatgaccatgcccgaacacgagagctaccgccttgacgaaggggcgcgaaagcaggtaaagcgcctctgcttgggaaaatgcattcgctttagaagacaagcgacccgaacggaaagcgtgcagaaggaaacgttcacgagcctgttcgaacacctcgacagccacggttatcgagtgaggaacgacatcatcctcttcccctccttcctcaatctcgacggattcggaagcgacatcgaaactctgtacgtgcccgtcagctgaagtgcataaggaaagggcttcggcgcagcgaacgcgacgaagcccttcaagggagggaaagaaccgcgttgctagtacagcacctcttcgtcaggcgcgtacacatggcagttctcgcagtagttgaacgtgatctctttgtccttctcgtggcagttcacgcatgcattgtagccgccgtgcagggaatcatgcggattccaatcacccaggtcagcagtgcgctcggcaagcgcttcgtagctaccgccatggcagctgagacactgctcgtcggaaacgtaggcgcccgcctcgctcgacaccgtttgggtcttcgtaccctcgctcgacccggaatcggcctgttgcggcgcacaacccgctatcgcgaacaccgccaccaacgcaaccgccacgagggcaatcataatgtccagacgcaaggtagaccgactcatgcctggcctcctttcaacatatgctctaccgccacgtagccgaacgtcgccgcacgacccaccgacgtgccgggaatatggcgcgggtagttgcctgcgtagaagttgcccgacacgttgcccgtggcatagagtccttcaataaccttgccgtccttgtccagcacctgggtgtcgccgttgatggtgaggccgcccaccgtggcaaggatgacgctgttcgtgaccaaggcatagtacgtctcacccgtgaaaggcttgttgttgcccgtgtaacggtagtagtcggggtcgcgctccaagccgtcctcgaagaagctgttgtagcgcgccaccgtttcctcaagggcggcggcgtcgatgcccgccttagacgctagctcgcccaaggacgaagcgcggaacagatggcccttggcctcgtcgcgctcaagctgtttctcggcgctcggctccttctccaacgcagaggcgatcatagcctggtcgaagatatggaaacactgatggccgcggcgcttctgcacgttgatggcgttcgacatgtactggcgcgcttggttctcgttcacaaagcgcttgccctcttcggtgacgatgatcgagtagttcatagcgccggggaagtacacgcgcttctcgacgaacgtggacggggtggcgttgctgaagttcatgaccggatgcggcaatgagtccatgtccgcgccgatactgaggcccatcatgtggccgtcgcctgtggttccccagctgggattccaccacacagaggactcgtagtcttcagggcgcacccacgcttgcatcatctcagggttcgcgtcgtagccgcccgtggccagcaacacgcccttggatgcgttgatgcgcacgtatccgtcgccgttcttagcgatgcagccgatcacacgaccgccgtcttcgcggatgagctgcacggcgggcatctcatagcgaatctccaggttgtcgtaggtttcggcaaccgcgcgcagctccttgcacacgtacaggccgaacagccacgtagtgctgacaccctcgggcatcttgaagttgacgtagctgtcgatgacggggaaaccgttgtagttcggcgcctggtcgaacttgtacagctgccaacccgaaccacccttgtcgagcatatcctgccagaaatcggctacttcgcccgaccggttcacgtacgtttcgatggagcaggggtcgacgcgccaatccgcagcacggtagatctcatcgcgcagctgagcaggatcgatatcaatcccctgctccttttggaacttcgcgcccaccgcgccgaaactctcccacgccgagcgtccctcggtcatcttctccaacgtgatgaccttcgcgccctcctcggccgccttcaaactgcccatcagcccgccgatgccggcgccgatgatgagaacctcgcactcctcggtagagctgatctcagattcggcgatatcacgatcctcgaacgcgatcggcccgcgcggaccgggaaaatcagccttgcgcagagggcacagcgacgcatcgtcacccagagccttggaatactcgttgcctgaatccgtcgcctccgttgattgcgcatcggcagccccgtcgtccgcaaacgccttgcctgctccgggaaacgcgagcatgcccgctgccgcagctccggttaaccccgctcctctgagaaagtctcgccgtgacaatctggcttgttccatctctcctcctttacgtacgttccctcttgacgccgctcagggcgcagggacaacggtagaccctgaaccatgtcgagggtcaagcaggagattcaaagagaacgacgggcttttcgacagaacgagcgtgctacacgaggtgcgcttcgccggaggagattgcggtttcgatgccggattcgctacgcagcacgagacggccttgagcgtcgacgcccacaaccgccccttccgccagcagattgtccgcacgatcgaccatgcgaacgttttgtccgttcaagctggagtaggcgttgaactcgtccacaagcggtgcgaagccgttgcgccgccatacaccgtacagcggcgcgaaggcggcgaggagcgcttcgagcactgcttcgacagcgacggccggcgcggcaacggaatccgcgaggtcggccacgtacgcaggacgattcttgcctcccacgtcggggcgcttgtcgggcggcagtacgttcacgcccacgcccacgcacacgccgccgccgtgcgcctcgagcgagatgccgcaaagcttcgcgaaatcaggcgctcggtcgtctcgcgcactgcaagcatcgccttcgttggcacaaaataaccgctgtgcacgatttttctgccctaattccttcccagattcggaaaaccccaggtcgcgaatttcggttgcttcaggaaatcgtgcatagcgcgccttttgtgccagcaccacatcgttgggccatttgatgcgcacggcctcctcagcccgcgcgcccgccagcgcaacgagtgcgcggcgcaccgccatgcccacaaccaggctcaacgtgggaagttcgcgcggcgccacctgggggcgcaacaacagcgagcaatacagtccgccttccgggctggtccacgaacgaccctgccggccgtaaccggaaacctggcgaagcgcgcggacgacgaggccttccggctctcccgcctccaacgcgcgcttgacttcgtcgttcgtcgatgcaacttcctcgtgcagagcgatgcgaaacgggaagccgctcggcgaaccgccttccccctcgttgccgaatccaaattccgaaacacgcgcatcgcctttccggagcgacgaagagccgtcgacgcaaaacgagggcacagagcgccccttgctcacagccgcacgctcttccccaccgtaaccccatcgacgctaaccggcacgtcattggcaagcacgtggccagggagcagctccaacaggggctgcactacgaaatcgcgttccagcaggcgcggatgcggcaacgtgagcacatcggcatccacgacgtacagctggtagtcgaggatgtcgaggtcgcacgtgcgcggaccgttctggatagcgcgcacacggcccaggctgttctccacggcctgcaggtagcccagaagctctttcggcggaatacccgtgcgcaaaagcaccacggcgttcacgaacgaatcctggtcgaggtagtaggccggctcgctctcgtaaaagctggagatgtcgacgatctgcgagtcgggcagcgaacacagctcggtgatggcctggttgagcatggcgatcttgccctcgcgctcctcgccgggcgaggccaccagcgggacgttgcagcccatgccgatgagcgcatacggccgcaacccctccaacgccgccaccgtcgcggccacgttatgcgcgcgcaccacgctggctcccagctcgcaggccatgagcgcctcggcagccgaaacctcgtcgcgcgcagaaggttcgtcgatgccgtacgcccagcccaagaagctcttgcgcgacaccgccaccatcaccgggtagcccaggcgcacgaactcttggaagttgcgcaccagctccagcgtctgcgacggcgtcttgccgaagccgggaccggggtcgatgcagatgcggtcgtgcgcgacgcccgcagcctccaaagcggcagcccggtcgcgcagccactcgcgcacgtcggccaccacgtcgtcatacgaaggcgcgttctgcatggtcgaggggtcgccctgcatgtgcatgaccaccagcccgcaatcgctgtcgcgcaccgcatccaccatgacggggtcgcggaagccggacacgtcgttcacgatggccgcgcccgcttccaagcacgcgcgcgcaacttcggcgtggcgcgtatcgatgctcacgcacacatcgcgctgcgccaatgcgcgcaccaccggcagcacgcgcgccagctcctcgtccacggacaccggcgcggcgccgggccgcgtggactcgccgcccacatcgattatgcgggctccctcctccgccatgcgctcggcatgagccagcgcggcatcgaagccgtcgtgctggcctccgtcggagaaggagtcgggggtaacgttgagaatgcccatgacgatgggcattctcgtatcgaactcataggttgcgcagcgccagatcatcgttcggtgccgtcgcctttctgctcaggggcttgcggagccggagcgtcgacaggcgcctcgtccgacgtcgacgaagcagatgcgggcgcatcgtcgccgtcgccctccgcaggctcgcggtacggcggattcggatcctggtcgcccggctcgaccggctcttccttccagttcggatcggccagatgctcgtcgcgggcgcgcgcggcggcctcttcggcctccttgcgggcgttgatctcgtcctcgtgcttgagatactcgtcccacgtgttgtccagcagggcaaggcacgcctcgccttccaccgtctcgcgctcaagcagcacgttggccatgagatccatctgctcgcgatggcttgccaggatctcgtaggcgcgatcatgcgcgtccttcatgatgcgggcgacctcgtcatcgatgcgcttcgccgtctcctccgagtagtcctgcgtgttgccgtagtcgcggcccaggaacacttcgtggttcggctggccgaacacctgcgtgcccagctcggcgctcatgccgtactgcgtgacgatggcgcgggccatcttcgtggcgcgctcgaggtcgttcgatgcgcccgtggtgatgtcgtcgcagaagatctcctccgccacgcgaccgcccatgaacacggccaactcgtcgcgcatctcgccgagcgagttgagcaccttgtcctccttggggatggacagcgtgtagcccagcgcacggccgcgcgagatgatcgagatcttgtgcacgggatcggcgtgcggaagcaggtggccgaccagggcgtgaccgctctcgtggtacgcgatggtgtgcttcgtctgttcgtccagcacgcgacccttgcgctcgggcccggcgatgacgcgctccatggactcggacacttcctgctgcgtgatgatcttcttgccgcgacgcgcggtgagcaacgccgactcgttcatgaggttggccaggtcggcacccgtgaagcccggcgtgagcttggccaccttcgacaggtcgacgtcgctgccgatgggcttgtccttcgagtgcacctgcaggatcttctcgcggcccttcacgtcgggcgcgtccaccacgatctggcgatcgaagcggccggggcgcagcagcgccgggtccagaacgtcggcgcggttcgtagcggcgatcagcaccaccgagtcgttgctctcgaagccgtccatctccaccaggagctggttcagcgtctgttcgcgctcgtcgtggccgccgccgaggcccgtgccgcgctggcggccgacagcgtcgatctcgtcgatgaagataatggccgggctggcatccttcgcctgctggaacaagtcgcgcacgcgagacgcgcccacgccgacgaacatctcgacgaagtcggagccggaaatgctgaagaacggcacgcccgcctcgccggcgacggcgcgcgcgagcagggttttaccagtgcccggagggcccaccaagaggcagccgcgcgggatcttcgcgcccatggactggtacttcgccgggttcgccaagaagtccttgatctcctgcatctcctcgacggcctcgtcgacgccggccacgtcggagaacttcacgtcggggcgctcctcgatggacttcttcgtcttggccttgccgaagctcatctgcgagttgttcgccttctgcatctggttgaagaagaagaacaggatgaggccgatgatgatgaagggcagcagcgtgccgagcagctccacgaacgggctgggcagcgccacctcgtacggcacgttgggatgcgccgccatgaggtcgccgagcgagccgccgtaataggtggacgtgaagttgcgctccacgcccagcgtggccccgttgatgtcggtggtgcccacgccgccgagcgccttgcccgtctcggggttcttcagcgtggccatgcgcgcgttgagcgcctggaaggcttcgttgaacgcatcggcgccggtggagcccgccgtgatggcgggatagtacgagcccgacaccgtgtagtcgccggcgttgtacaccaccttcgtcgcgcgatcctgctcgacggcctgcacgaactcggacgtgatcaggcggtcggtgggcttggcgcccgcggacgacatattcaggaactgctggcccacgaagaaggccaccagcatgaacagaaccaccgagatgatggtcgtcctcgggctgggctgctggaactgcgattgtttgttttgctgtgccatagcgtctaactttccttttctcaccgactcgcgctgcgagacggacagacccgcgtgcccgcccgtcatcgcatgcggccgatgccgcatacccttagcacgacgcgactcggcaacgccgaaccggtcgaccgccaaggtagcttcgctagtaaatctccggcttcaagatgccgatgtagggcaggttgcgataccgctccgcatagtccaacccgtaacccacgatgaactcatcggggcactcgaaaccgatatatttgcaatcgatcttcgcctgcgcaagcgtcttcttccgaagaagcgtggctacctcgatggaagccggttgacgcgacgacaggtttttcagcaagtacgtcagggtaagaccggagtcgaggatatcctcggccacgatgacgtgacgcccttcgatttgagacgagaggtctttcaggatacgcaccacgccggagctcttggcgccgtttccgtacgacgagatggccatgtagtccatttcgagcggaagctcgatcttgcgcgccagatccgccatgaagatagcggcaccgcgcagaaccgagatcaggatgatgccctcgtcggcaacgtcggcgtaatcgctcgtaatggctgcgcctatctcgcctacgcgatcggcgagctgcttttcggtgaacaggatctccgaaatgtcgttgtgcacgttcctaacctctatcgtcgcatttcgcttctgctatcgcccctgatcaatctgcgagatcaatgggcgagagcgtcacgcttaccttgaattcagctagtgtaccattgcctctccgggaaaaggagacgatacggtaacgccagcctgcctgtcacgatttttacatttcgcaatgggaactgggacgataggttgaaaatgccataggctggcgcagcaagtcagcaagggcggttgcggcgcgcgggatcgtggggagagcgcaggcgaagcgcatctcaatgtgcgagccctcgactcgactgagagatcgggcggcgcagccgcccagcgtcgagtcgttcgccgtccgtcaggacgccgaacccgcgaagtccgggaactcctccagcaaacgacctacgggcaggccgatgacggtgtccatcgcgccgtcgacgcgcgccaccagatcggctccggccccctgcacggcataggcgccggccttgtcgaacgactcgcccttgcgcagatagtcgacgatctcttcgtcggtcagctcgcggaacgtcacagccgagcgatcgacgaacgtgcggaagcccagcgagatgttctcgggctcgggcgcggccaccatccatacggatacagccgtcagcacttcatgcgtgcgacccgacaggcagcgcagcatacgcttcgcgtcggacaggctgacgggcttgccgaatatctccccttcgcacaccaccatggtgtcggcgccgatgacggcggccatgcctgtgtagtcttcggccagcacctcctgcaccacggcgccggctttgcgctcggccagcttcttgcacgcctcgggcggatcggccaggaggtcgggctccaaggtctcgtccacctcggacgcgtgcacgacgaagcgcacgccggcgtcttcgagcagctgcttgcggcgcggcgacgcgctggccagcacgatgtcgagggcgggcgttacggggtcggcagacgaagcggccgatgaagtgttctgttcgttttccatgcgcggtattgtagcgcagcgggcgcaagcgttgcaccaagagcacgcaggttccacgcgaagcgcccagacgcaagcgcgggcaactctgaccccgaccgcaaactcctccccgattctccctgctacacatctcaccgaattgtttcacgtgaaacaatcgtcgcgatgcgctgcgataagagaacgcgcgtacgcgatatcgttgagaacgcataagccgtccctcatcgatttcaataatcattgcgatatcgcaatgattattctatactcggatcatatgccgctcgcgcagaaccaaggaggttgcatgctgtcggtcgtcgaaagcgccgaaatcctacaggtcacgccaacgcgggtgcgggcgctcatcgcacaaggagcattgccggcgcagaaagtcggacgcacgtggacgctccgggaggaggacgtgatgcagcgtgccgcaacccggccgtccgcaggccgtccgcgcaaggcggacgttccgtcccctgcagacgacagcaagccgcacgcagcagcaagcgagctctatcgcgcatgcaaagaccatctggcagcgtgcccgagcgctgccgagatagcggcgatcgacgaccccgagcaggccgcgttccgcatcgccgtcgccgacttcttcctccaacgcaaacagtcggagctcgttcgccaaggggtcttctgatgagcgagcaaccgttctacgtggtgttcgccggcgtgaacggagcaggcaaatccaccctgttccgcagcgatttctggcgcacgggagggatgcccgccaccatggcgcgcgtgaaccccgacgaaatcctccgagagcaaggcggggactggtcgaacggccaggatcaagtggccgcaggcaggatcgcgctgcgcagcgtggacgagcatctggcggcacgacgctcgttcaatcaggaaacaacgctggccggccatcgagccctgcgcaccatggccgaagcacgcgagaagggataccgcgtgttcctgttctacatcggccttgcaaacgaaggcatagccctgcaacgcatcgaacgccgcgtgcaggcgggaggtcacgatatagatgaggcgctcgttcgaaaacggtaccgggcgtcgcttgcgagtctgagcaaagcgctaccctactgcgaggaggcgcacgtattggacaacaccgtcgcgttcaagcgcatcgccctgtggcaccgcaacacgctcgcttggtggggcgcgtcgaagtcagtgggagcatggcttcccgaagccatcgccgacgaatcgctttggagacgatcgtagcgcgacctacccgcgctttcggcgggcgcggtaggcggccatgggctctatgcggacgccgcgcttgttcgcgctgacggcgagatcgccttggatgttggccacgtagccgctgcgaggcttgccgcccgtctcgtcgtcgaacgcggccagcacggcctccaccgaggccgtctccacgcgggcgtcgcgacccagcatcagctgcagcgcgcgcatcacggcgcgccggcgcaggggcaacggctcggcgccgaatgcgggcgccagcacgcaacctgcgtcgtactcgtcgccgagcgcttcgacgtggcccgccatcagcccatccaccatgcgctccagcatatcgtcctcgtcggcaatgaggttcatggtgcggccgagcacctccagaagctgcgggttgcgctctttcgcacgcgggacgatctcatggcgcacgtaggcccggaaccggtcggtgtgcgcgttcgtcgcgtcctcgcgccacaagttgccttcgtcgtcgcaggccgccggcgcaccatcctgctcgcggcgcacgatgtaggcgcgcagctcctcgcggctcgcatccagcagggggcgcaccaccggcccgttgcggtgcttcatggcgcggaacccacccggccccgtgcccacgatggagcgcatgtagaagctctccacgcgatcgtcggccgtgtgcgccgtcaggatgcgtccatcggcaagcggtgtcgccgcatgcaagcagaggctttcgagcgcttcgttggccgccaggtaacgctcacgcctggccaccgcctccacgttctcgcccgtgcgctgcgcctctcccgctatgtctatgtcgcacgagaacagcggaacgtccagcagctcggccaactgagcgacgaagcgagcgtcctcgtcggcatcctcgccccgaagccggtggttgacgtgcagcatggcaagctgccccagcgccccgcgttcccgcaactcgcaggcgatatacgcgagcgccgtcgaatccgacccgcccgacaccatcagcagcgccggcgtatcggcatcggccaagcggcgtgccgagagcaccgccgccgcccgatcgaccagcgtttccgtttgcacagcagccatcatgccctcccctccaagaacctccgctcgaactcttcttctggcagaggacgaccgaacaggaagccttggatataatcgagacccatgccgcccactacttcgtattcttcgttggtctccacgccttcgaggcacacgctgatgcccacggcgtggcacaattccaccacgaacttgatgaacgtggcatcgaacgtgctcgtctggatatcgcggatgaacgcgcggtcgattttcacgatgtcggcaggcgacgtcttcaacacgcccaacgacgagtagcccgtaccgaaatcgtccatagccacgcgcacgccttgcatgcgcagctgatcgaacagctcatgagtgacctgggcgtcgtcggcgaaacggctttcggtcatctccacgacgaggctctcaggaggcagctccgcctctcgcaacgtgtccacgataagaggaaccagaccgtcctcgtcaagttggcgatacgacaggttcacgctcatggtaaacgaggggatcgccttcctccatcgtttacaggtgtccacagcatgttgcagaacccacgtgcccacaggaacgataagaccgctctcttcgagcagcgggataaactcgagcggcgacaagtcgccatactcgtcgcaacgccaacgcgcaagcgcctcggctcccacgacgcaacccgttgcagcttccacctgaggctggtagcacaggctgaatcccttgaagccgttctccacgctgtcccgtagcagctccatcagctcgagctcgcgcacgcgctcggccagaataggctgcgagaagtttacgcagcgcttcttcccatgccctttcgcgtgttccaacgcgtaattggcgtacttcacgaggctctcgtacgtttcggcatcgccgggatattgcgcgatgccgccggacagcgtgcaatagaacttgcggccctcatgatcgtgctgtcgctgaaacataccgcctagctgcgcgtatgcgctgcgcagcacgtcgacatcgtcatcgacgatcacggcgaattcgtcgccgtccagacggtacacgcgcgcgtcctcgggcagcgagctttggatgcgctgcgccacgaaccgaatgacctcatcgccgaatgcacggtcgtagcggtcgttgatgtgccgcaagtcgtcgatgcccagcaccatgaggctgatccgcgcgctctgcatcgtctccatacgacgacgcacatcgtcctcgaactcgaacttgttgaaaagaccggtcagcgggtcgaccttgctcttctttcccaggttcgtgatgaacccggcgaacagcagcggctttcccttcgcatcgaggatgagccggccgcggcatcgcagacgcacccattcgcctttgcggttgatggcgcgatactccacccaatggcgcgtcgtgcgcgcatcggcgacttcctggttcgattcgaggaacgcctgcttgtcgtcaggatgcaccttcgaaccccacacggctgccgcgttttccaccacctcggagggaaggtcgaactcttccaccatagcgcgcgggtagcggaacacgccggttctcatgttgcatacgtacagataatcgtcggtgctctcgaccagcgcgtcgtacagcttgctttcatcgtacgagaacgagcacggatcgaccgacacccccctgcccgatcgctcagcgctgatcagggcgttgatgttgcgatctatatgaaaacgtcgcttctcctcgtacatacgccggtccgccaaggccagcacctcgtacaactccagcggcgcttcggggtccgcctctgcgatgccgaagcagaaacccatctcgtagggaggatcagtgcggcgcggaatcgccgagagcgcagcgcgtgcgcgctcgatcttgacgcgcgtggaagccgcgtcgcctaggaatacgcacacgaactcgtcgccactcaagcggaacccgtaatcgttgggaccgaattcgcatcgtacggcgttcgcggccgagcggatcaggtaatctccctcggcatggccatgaagatcgttcacatccttcagccggttgatgtcgtatagaacgacggacacctgctcgccctcgaccgcagcccgcgcaagcgagatgcccagccgctccttaccggctcggcgcgacagcatcccggtgagctcgtcggtgttcgcagaaacgagcgccgtgatgtccaccgactgctgcaaatgcacacgcgacccgtcgacccaggtcaccaggctgtcgtagttgcggtacgtgcgccccgtcatggggctttcctcgtcccactccaccaatggaacttcgtcgccgcagcttagaagctcgtcaaccgggcagaaggcgcatcgctcggtcaagccgcgctgcagcacctgccagcacaccttgccctccggatcctccacgccgtaatcgtgcttcatgaacccgttcatataaagaatgcgatccgtcttcggatcagtcacgtagatgctcgtgcgcatgccttcgagaaccgtatcgaacacgaagctgcgcagatcggtggagccgccatggctcccgtcgaccgcgagcggcgcgtcgtgccgcatcctcggaaccgcttcgtcaggctcatcgttcgacgactgacgaatatcgcaatcgctcatcggtcgctcctttcaaagaagccctcgacgcgctccaccagcgcgatcgtctcgatgtgatccgtatgagggaacatgtcgaccggctgcaccgtgcgaacggcatagccgcgctggcgcaaaaaggccaggtcgcgcacctgcgtagtcgggttgcacgagatgtagacgatgcgccggggcgccagcgtcactgcggccgcgaggaactcctcgctcgacccggcgcgcggcggatccatcagcagcacgtccacagcatcgcctgcggcggcgcgctcgcgcatgaacgcccctgcatcgcccaccgcgaaccgagcgttctccacgccgttgtgcttcgcgttctcgcgcgcgtcgcgcacggccgacgccaccgtgtccacgccgatcacctggcgcgcgccgcgcttggcggccaccagaccaatggtgccggtgccgcagtaggcgtcgatggccgtttcagagccggtgaagccggccaggtcgatggcgcgctcgtacagcacctcggtctgcacggcattcacctggtagaacgactgcgacgagatgcgaaagctcagcccgcacagcttgtccaggatgaagcccggaccgtacagcgtctgctcgcgctcgccgagaattacgttggtctggcgctcgttcacgttctgcacgaccgacgtgatgcgagggcagcggcgcaccagctctcggcagaacgcgcgcgatgcggggaaagcgcggccgttcgtgaccagcgtgaccaggatctcgccgctggtatgtcccacgcgcaccacggcgtggcgcaggaagcccgtgccggaatcctcgcggtacggctcgataccgaagcgcggcatgaggtcgcggaccgtgcggatgatgcgcttggcctcttcgttctcgatgagacagccgtcggtggggacgatgcggtgcgatccggccgcgtacatgccgcagaggatctcgcggcgcggcttctgggcgcgcttgccgtcgcggccgccgcgcgcgtcgcgccccttccccgcccgagcgttcgcggagccttgcagcttgcggccgggcgcgtagggggacaccaccttgttgcgatagtagtacggctcgtccatgcccaggatgggccgcaacgcggacgcgtcggccacgtcggcgaacagctcggccacacgcgtgtccttgcttgcgagctgctgcgcgtacggaacgcccacgtgctggcaggcgccgcactcgcgctcgacgggacagacgggcgctttctgcgtggaacgctgcgcgggttgggcgctaccagacgaggaacttggcattgtcgatgctccaatgtacgtcgcgaataaaccgttgcagctcttcgccgtcgcgcagctcgaagagcctgacgatttccgcatgctcttcgttggccttgcgcagcaggccgtccagctcgtcggcgcccacgttggcgtactcccgcttcatgaagtagcggttcatctggtgaatcagccctaccaggcgcgaattgccgcacttgcacacatagcagtcgtggaagtcgtgctgcaggtcgtcgtatttcttgtagaggcccttctcgatggccagctgcatggaaccgtgcaagaactgcagctgcgcgatgtcgtcgtcggtcatgtcgcccacggccaacagcgcggcgcggccgtccagcgggccgatgatctccacgatttcgcgggcgctgtcctccgtcacgcgcttgacgtagaagcccttgcgcggcacgttctccaagtaaccgtcggcggccagctggatgagcgcctcgcgcacaggcgtgcggctgacgccgagcgcatcgcatatctgctgctcgctgatcttgtgatcgtcggccagggttccgccgtcgatcaggtcgacgatgtggttgtatacatggtctttgagggaacggtattcgttcgtcatttcatccgcctgtcgtacggccttcgtgtatgccaatataccacaagcactaccgcgcattcgcgcgcttgccccgcatgcacggaggttctgccgcattcgcgctcgcattccgacacgcatcatcgcccgagggaattcgagggccggcgtgcccctcgccgtcgccaaatgagacccaccatccccttttcaacaactccgaaaaacttcccgtttcctcttgattgtatacaatatacagaatacaatatgcgccataggaagcaaacggaaatgatctctcacgaaaggatccgtcatgaccaagttctccaacgtcatcgtccgccgccccgccaagtccatggtcgagggcatcacctccgcgcccgaactcggcaagcctgattacgagaaagccctcaagcagcatgacgactacatcgcggccctcaaggagtgcggcgtcgaagtgaccgtcctgcccgccctcgagcagttccccgactcctgcttcgtcgaggatcccgcagtcatcacgcgctgcggtgccatcatcacgaacccgggcgccgacagccgcaacggcgagaaggacgagatcgagcctgccgtgcgccagttcttcgacgacgagcacgtgaagcgcatcgtgagcccgggcacgctggacggcggcgacgtcatgatggtgggcgaccatttctacgtgggccagtccgcccgcacgaacgaagagggcattcgccagttctgcgagatcctgcaaggctggggcctcgagggttccgaagtgaagctggagaaggtcctgcacctgaagaccggcgtgaactacctggaggacggcaacatgctggtgtccggcgagttcgtgacgaagcccgacttcgagcagtacaaccgcatcgagatccccgaggacgaggcgtacgccgcgaactgcatctgggtgaacggcaccgtcatcgtgcccgagggctatcccaccgtgctgaaggccgtgcaagacgccggctacgagacgatcaccgtcgatacgtccgagtaccgcaagctggacggcggcctgagctgcctgtcgctgcgcttctaacctgggggctgtttgtggcggccgcctagccgttcagaacctgggggctttcgcacccggcccccgaccgctcggccgggaaaagcgctagcgaacaattcactggattgttcgctagctcaaacccccagaaccttcacggctatccgactcgtcacaaacagctcgtctcctccgttcttacatcgccgcatacggcgcgctgcggcacttgcccggcgcgccgttgcatttccgacgctcgcaccttgccgtgccctgcgtcagcattcccttcgacccccagataaaggaggggctatgtcgaacgctgcctctgaaaccctcgacgggagcctcgccgccagcgcaggagcctcccgcgacaaaggtcagatcatcgacccgaacggcctcgatctgttccgcctcaccatgatggtgatcacggccagcatctgcggaggcatcttcgcgctggccggcgacatggccgccggaggcgccagcaccggcgccgtactcatcagctgggccatctgcttcgtgggcgtgttctcgctcatgatgtgcttcaacgggctgtcgcaggcccgccccgatctcaccggcggcatctacgcctacgcggcggcaggattcggcgacttcgtcgggttcaactccgcatggggttactgggtgtcggcgtgcctgtcgaacgtgtcgttcgccatcctgctgttctcggcgctggggtacttcttccatccgttcgaaagcggcaacaacctgctgtcgtgcgtgtgcgcgtcggcgtttctgtggctgctcgtgtggctcgtgtcgcgcggcgtgaaggaagcggccggcatcaacgtcatcgtcaccatcgcgaagctcgtgccgctttcgctgttcgtgctgtccatcgcgctgctgggcaagttcgaccccgccatcttcatggagaacttctggggcgaagcgggcgggcccgaccttggcacgcaaatcgtgtccaccatgatcgcgctcgtgtgggtgttcaccggcatcgaaggcgccgtggtcatctcgggtcgcgcgaaatacgcccgcgacgtgggccgcgccacggtcatcggcttcatctcggtgttcgtactgtacctcatcatctcgctggagagcatgggcgtcatgccgcgcgcgcagatggccgagctggccaccccgtcgatggcgggcatcctcgaacatgccatcgggtctgtcggcgcgagcatcgtgaacctcggcgtggtgctgtcgcttctgggcgcgatgctgggttacgtgatcatcgccgccgagacgccgttcgaagccgcgcgccagggcgtgttcccgaagtcgttcgcgcgcacgaacaagaacggcgcgcccatcgtcaccgtgctcatctcggccggcatcacgcagctgttcctgatcgtgtcggtgttctcgtcgtccacgtaccaattcttctacgcgtgcgccgtgtccaccatcctcatcccctacgtgtgctcggcggcctactacatgaagatcgcctggaagcgcgagcacctgacgcccgagcaggtgaagaaagcccgcgtgttcggcaccgtcggcttcgtgtacacggtgttcctcgtgtgggcggccgggctggtgggaatcatgatcaccactatcctgttcgctcccggcatcatcgtatatgccatgggccagcgcgaacgcggcgagaagatactgccaaacatggcggacaaggcgatagccgccgtcatcgtggtgctcatggcggtatcgatcgccctcatggccaccgggacgatacaggtgctgtagctcccactgcgccgcctgctcgctcgcgcaggcggcgcatacgcgcgggtcggcgccgttcgttgggttacggctccatgaccgatgttttccgtctcgctttcagcgtgctacagtgatacggatatatcgtcgcacgtcaaggagcgtcccatgaacttcatcatccgctggctcgtcaccgctatcgccgtgggcgttgcggtgtggatcgttccgggcatggatctgctcggcggcaccgacgcgtgggtgggcatcgccatcttcggcttgatcctgtcgctgatcaacatcagcatcaagcccatcatgcaggtgctcagccttcccatcagcgtgatcacgctgggcatcttctacctggtggtgaacacgctcatgctgtacatcgcggcatggctggccaacgggatcttccaagtgggactggtcatcgactcgttcggcagcgcgttcgtggcctccatcgtcatcagcatcgtatcggcgctggtgaacgcattggtaggcaaggactagcatccggatcgcaaccacctgcaagcggcaccgtcggtttcggcagtgccgctttctttggttcgagagcgctccgaaacgatcggaagggtcgtttgcgtgaattctgagcgcagatcgcacgcaaacacgacaaccgccgtacaatgggcgcggcaaaaattgggcaggcgcacaagcaaagcggcgcgtgcgcccgcatacacgtgaggattggaatcgtgaaacagcagaccgacgccgtctcaggcgtctccgggtgcgcgtccgcacctgctcatggcgatgtctcttggcgcgcgaaagcaggacgggcgggcaagcgaggagcgcgcttcgccgcgcagctcgccctggtggttgccgtgtacggtgcgggatgcgcgatcgcaagcgtgcttcctgtccgacttccgggcaacatcgtgggcatggtgctgctgttggtactgctgggcacgggtctgctgaaagcgcggcatgtgggcgacgcctgcgactgtctgctggacaacatgtcgctgttcttcattcccgccggcgtggccatcatgggctgcgtctcccttttggagggcaacgcgctgaagttcgcgctcgtatgcgtaatcaccacggtgatcgtgttcttggccacgtcgtacacggtgatgctcgtgtctcggctgacggcgaagcgcgtcgatgcgacaggcgtcgcccgcgtcgccgacgaggaggcgtaggcgcgatggacggcatagcgcaactcgcactgacactcgcagtgggaaccgtcgcctcgttcgcagtgttcaagctttccgtgctgctgtacgagcgcgtgaagtcgccgctgctcaatcccttgctggttaccgtcgcgttcatcatcgcagcgctcgtggcgctgcgcatccccctggattcctacgagcagagcgtgcaactcatctcgtttctgttaggaccggccaccgtggcgctggcatactcggtgtaccggcagcgccagacgctcaaggagcacttcgttcccatcttcgcgggctgccttgtaggctcggtggtgtccatggctagcgcctatgcactatgcaagctgctggggctcgacgatgcgctggcgctgtcgttcatcccgaagtcggtgaccacgcccatcgccattgcggtatcgcagcagctgggcggcatcacgtccatcacggtggccgccgtcatcgtcaccggcatcctgggcgccatcaccgcgccgctcatggcgcgtctgttccgcgtgcgcgacggcatcgccaagggcgtggccatcggaacgtgcagccacgcggtgggaacgacgaaagccctcgagatgggcgagctcgaaggcgccatgagcggcgtctccatcgccgtgtcaggtctgctgaccaccgccatcgtcatcgtcgcaagctgttttctataggaagacgccacctctccgcggcaggcggcacgaatgcttcgcgtgagacgccctttcgttttcgcagatgaacgcctcgcttgcgaactttgcgcgcaaccgcttcgtatatgagctagcctcgcatcgcattcgcgtggaaaccgcgtcggaaacgccggcgagaaacgtggaatccgcgtggcaagcgcgtcggacgcgcgcgagatcgaggaagatccgcgctggatgcgcgccatctgcgcatgatacgcggtcgctatactaagaggtacgaagcgcagaggcggcgcggcaccacacccctttccaccagatgctcccgagcgagggaccgcacggagggaggtggacgccatgaccgttttggccttgatagcggcgatccttgagttcgcttccagcttgctgggttttttgaccgcaatagtggagcggctcccgatccgcaaggacaaggagccgtaagaaaagtagccaaaccgccgaagcgattcgagagccgtggggagttagagctccctgcggctcgcctctattatacgaacgggcggcgcaaaagcaagcgccgttacaacgcgatcctatagatctcgcgggcatcgtccatggtgagcttcttgaagctgccgaagggctcgcccttgttctctttgagcgtagggatgagcttctcgatgtcgtcttcctccacgtcgagctccgcgagcgtgataggcatgccgagcgaggcgaagaacgagcgcgtctcgtcgatggccgacagcgcgtcggcgttcacgtcgcccgtaggcgccagtccgaacacctcgcgaccgtagtaggcgaagcgcgccgggttcgcatcgtagacgaactccatccaggccgggaacatgacggccaggcctgcgccgtgcgtgatctcgggatagagggccgacaattcgtgctccaggccgtgcgtcgcccagtcctcgtgacggccgacgccggcgaggccctggtggcacaacatgccggcccacatcacgttcgcgcgcgcatcgtagttctcaggatccaccatgacgcgcggcgcctcggcgcgcaccgtcttcataagcgacaggcacaggttgtccgtcaccggcaccgcgcccacgtcgtcgaagaagcgctccagcagatggcagaacatgtcggtaaggcccgcagctgtttggaacgggggcagcgtgaacgtgagctcaggattcatgaacgcgagcttcggacgctgggcgttgttcgcgtagcccgatttcatctgcaatgcgtcgttcgacaccaccgtgttcttcgacgcctcgctgccggcagccgggatggtgagcaccacggcgatgggcagcacgtcgtccgtcagccgcttcgtctcgaagaaatcccacacgtccccgtcgtagtgcgcgcccacggcgatggccttcgccgagtcgatgaccgagccgccgcccacggccagcacccagtcgacatcgtgttccttgcacagcgcgatgccttcgcgagcaagcgtgatctcggggttcggacgcacgccgcccagctccacgtgcttgatgccctgtgcatccaacgatgccttcacgcggtcgatcaggccgcttttcacggcgctctggccgccgaagtgcagcagcaccgtacgcgcaccgcgctcggccagcttgcttcccacctgctcttcagcgccctttccgaacacgaagtgggtcggcgacacgaattcgaagttctccatagacgttcctttccgccatgcgttcacgtcatgttgattgttcgtggtgcaacgtatcacatagtactaccagcagcgtctccaagaaagagcatcctgcaccgcgcctctagcccagcgccacgtccaggatcatcatgaccaggaagccggccatcacgcccagcgtgccggcgttggagtgctcgcccagatgcgcctcggggataagctcctccaccacaacgtacatcatggcaccggctgagaacgccagcatccacggcatgtacggcgagatgagcccggcgaacagcaccacgaggatgccgaacaccggctcagccaaacccgacagcgctcccaatgcgaacgccttcggtgcgctcatgccctcctgcagcatgggcagcgccactgctgcgccctcgggcacgttctggataccgatgccgatagccagcgccacggccatgccgaacatggcggggtcgccgccgttctgggcagccatggcgaacagtaggccaacgctcatgccttcggggatattatgcaacgtgacggccgtgaacaggagcgtgggacgatcccatttgctgggcaggccctcgggcttgctctcgcccggatgcaggtgcggcaacagctggtgcagcaccatgaggaacgccacgccgatggcgaatccacccgcagcgggaatccacccgacctgccccgcttcctccgcgcgctcgatggcgggaatcagcaacgaccacacagacgccgctatcattacgccagccgcgaatcctaggaatatccgctgaaacaccatgctgttgcgcttgcgaaacagaaaaaccgacgcagcgcccaacgtggtcatcaagaaggtgaagccggtcccgccggcagcccacagcaaagcagtttgcatgcttgctcctatcgtattcactcgttcgtgctcatcggcgcgtcgcacggaatcggggaaaccgacggcatcgcgcggagccgtgtccttgtatcaatccacagtgtacgacaataatcgatcacgcaggcgatgctttccctcagcgtcaacttgaagctgccagcgcacgggaccccatcatcgcccgaaaaacacgcctcagcgcgtggagcgtgtttttcgggcgatgatggggggcttgcagcggagcccccccccgacgcaacgaggccggggatgctccccggcctcatcgaaaggaataccgacagtaccgcttggctgaaagcctactagcccaccgctcacacgatgttcgtagcaatacctcacgagactgtttacttggcgaagatagtctttattcgttcgtattgcgatttttttatcaactgtcggacaacgccgattgtacgctcttttgttcggtttgcgaaccctcagaagcgtttttgtgcaggtgaacaaccaaatcgttgccaatcgtcaccgcgttgtcacgcctccgtttctggtcggctacgcaaacttcccggccgcaaggtcacgcccgagcagatacccgaacgtgaggcagttgatgccgtagctgttgcccggtatagcgaagttgtacgtgttggcgtacatatcgcccaccatagcgccgacgttgaacaagccggggatgggctggtcgttctcgtcgcacacctccatgtccttgctcgttcgcagaccgcccataacagtcatgaacatcgcgtagttctgcgccgcgtagaaggggcccgcctcgtctatcttcacgaggaagtcgggattcttgtagaagtcctcgtccacgcccttgtcgcacagctcgttgtagcgcgcgaccacctctttgagcttcgcagcgtccaagcccaactgcttagccagatcgtccaacgtgtcggccttgaagtacgctcccgtctccacacctgcgtcccacatggccaccaactcgtcgggagtaagcgggggcaaggtgtaatccatgccgaacgaataccactcgtgccccttgtccaggatggcttgcggataattcgccgtccagatgccatacgctacgttgcccggctgagacaacaggtgattcgagctgtaaggcgccgaaatatcctcgcgctggtaacgctcggtgttcatgttcacattcaaacccatgtggaagccgcacggctcgtggctgccgccccaggcgccctgcatcatgggcgcgttcggatacgcatgctgccacgccgcaccaacccacaggcccatcttctgaccgtcgccgccgtagatgccggtgaggttgaagctggtgttgtagtcgatctctccctgctcgtaacccactagcggcagcaccatcgggcagtacgcggccagcatctccttgtcgttggagaagtcgcccgtggccagcaccacagcctgcttcgcgacgaacttcacatagctgccgtcggccatcttcgaagcgataacgcccgtcacgcggcccttgttgtcgtcctcccggatgagctgctcggccttcgtgtcgtagataatctccacgcccagcttctgcgcctttgcttcgagcgcctccacggcgccctgctggcccgtcgacaccatggcgctgttgccctcggtggagaaggcgtgcgcgtagttcggccccaggtcgaacgtgttgtcgcgctccatgatgacctgcaggccgctctcgcgggcgatgtcgatcatccagttcatagcctcttcggactcgttatagccgcgcatccacttctgctggtcgacggcgaacgaggcggcacgcatctcgtgatagtagaacggcactggatcgaacggctcgatgcccagctcttccatcaccttcgagttcttcgcgtagttcgagccgccgcgagagataggagcgctggccgccgagaacagcgtcaccttcgcgccctgctcggccgccgacacagccgtggtgaagccggacatgccgccgcccaccacgatgatgtcgttctccaccgtctcggtgatctgatcatcgggaacgggctcaggcggaatcatgaacgaccacttcggcatgccgtcggtcagcttgagcaccgcgtcggacgagttgatcgcgccgtccattgcgggcgatgcagccttcgcctcgtcggtcgcgccgccgctgggcgtgcagcccacgatgcccgctgccgctgctccggccgcacccaccgctccgaacttcagaaaatcacgacgcgagaatctttgttgctttcccatgatgtgctccctcctggttagatacctgccccttgcaggcatccccatcttacgtaccgagccgcatcgcaagaaagcagcttcgagttgcccacccgcaactgttttctgcttgcgctccgatcatgatcggaggtatcaagaaggcgtcggcatgcgctatgctgggagccgacacgaaacggcttctgggaggggaccgtggatattcggcaactggattacttcatcgtcgtggcacagctggggagtttcaccaaggcggccgacgagctttttctgtcgcgccaggcgctcagcaaggccgtgcgcaaccttgagcacgaactggggcaaccgctactggcgaatcgcgacaaccatctggagctgacggatgccgggcgcacgctgctcgacgatgccgctccggttgtggaagctttcaaacagctggagcgccgccacgtcggctgcgtcggcgcccctgcgctgcgccgaacgctttcggtggccatggcgcacggcacggcgctctccatgcctgatcgagccatcgacgcatttcgggaagagcatcccgacatcgtgttgtcggtggaggaggtgaccacggaaacagccatcgacatggtgcgcacgggcgaatccgacatcagcctcgtgggatcggctccgcagtacctcgaggaattcgaccccatgctggtggtggagacgggcgtgtacgcgttcgtccccgaagacaacccgctctccgcgcgcaaagagctggagctgagcgacctcgacgggcagccgttcgtgacgttcggcaagcgaaaccacctgcaccgctacttcgtcgaggcgtgcgaggcggcaggcgcgcatccagatatcctcatgaccacgtccgacgccgaactactcgtccgaagcgccacgcaacagcatgcgctgtatttcgggtttccaccccacgtgctcaacgacccgaaggaggggtgcgcactcgtgcgcatcgccgtgccgcatgccagtgcgttcggtacctacggcataaaacgcaaaggagcgccactctcgtcgtcggcacggcttttctggcagtacctgggttcgctgtaaacgaaaaaacgcccccgcatgggcgggggcgcgatagctcggagacgcttgcggcctattccgcagcagccagcggggacggcacggagtacacgcgcgcggcgttctcctgatcgaggtcgtacaaggccttcgcatcggagccgaacagcttcatgcgggtgatcatcttgtcggcgttgtcctcttcctcctgctgctcctcgatgaaccagtcgaggaacttcatggtgcggtagtccttcacctcggcagcggcggcgtagatgtcgttgatgaggctggtcacgtacttctcgtgctcgagcgcggcctccaacggctccaggaacgtggtgaattccttgtcgggctgatcgatggccagcagcttcaccttgcaaccgttctcgtgcaggtagttgcggaagataagagcatggtcgcgttcttccttggcctggatctcgtaccagttggcaaagccctcgagaccctcctcctcgtagtagtcggcgaaggacagatacagatacgaagagtacagctccttgttgatctgatcgttcagcaattcgtacacgcgtgcgtccatgagcatctccttcttgggtcgtacgggggtgcaaacaggttgggcaccccgtttcatctgcgtatatgataaacctcataaggctttccgacgaggttcgcgcgcacgctcgcgccaaatcaacacagcggccaaccggatgccagatgcttattcgacctcttcggccaagtcgagcagctcgccctcttcgctcgccctccgcgcgggttcgcccgccgcatggagccgccctatggccgccaccacctcgctcagcactacagccacgatgtagatcgacaggacgctcgaccacagcaactgggcgtgagcgccgaacagctgaaatacggtcatgccgaccgccacgctggccgcacagcttgcgcaaaacgcagcgaacactttggagaatcccacgtcggaactcttcgccatccacaacagaaccacgaggcccagcacattcatcaacgccacgcccaaataggagatggtagagaacagcatcagccccgacaaggcgccggtagcgttggcgatcgggcacacaagcatgagagccgctgcaacgggaagcgctatacggtagaacgcttgaagaatgccgcctcgcgcgcggtacgcgtgcgcaactacccaccataccactatggctagcagcagatacgccatcggcttgtacgcgacgtccccggactcgacaccgatccgatcggaccatagcgtcaaaccgatcgtgaagaagttgaacatgaggccggcaaccgccgcccatcccttctgcatgacttcgcgcatggtttcgagcggctttaccgcgacgacgctgcgcaagccggccttgatttcgtcggcctgcacgatctggctcgccagcaagggcagcgccccgcacgataccaagacgagcattccaaggcagaacagaaacggcgtgccggcatgcgacaccacgaaccaccagcacgaggccgccaggaatgccagcatcgtgttgagcagtgccccttggtaggaaaacagacgatagtagcgaccccattgacgcagcaggcaggtcaggccgaagcccaggaacaaaccagcacccgcagcgctcaccggagtaggcaaaacctggtagagcagcgcgcacaacacgcccgcgatcgatgcgagcaaccctacgccgatggaccagcgtcgcttctcgccgtcgtgcgccgagacgaacacgacgacacacaacgccaccacgcccgcaaggaaagaatggatgaacagatccgccgccccttcgagcgcataggcgcccagcagcagattgtcggcatgcaggcatagcgcgaatccggcaagaacgcaggacagcgccaagcccatgggcgaccactcgcgagcatatttcgtgataccgttgatcagattacctttccatgaagcgatctattatagtgcaaaagcacgtaaacgcaggtaacagataccagatcggccgcgtgagaagtccttgatcccagcgttgcgcagcggaaacgctcggcagcccgcaaacgcacgcgcgccgccccggaggagcggcgcgcggaacatcaggctgggcgatgcccgttacaacatgggcaccaccatggtcagcggcagggccgcgaccaccaccaggtagcgcagcaggaagccgcccaccagcacgcccgcgtcggacgcggcgctgatccagtgagctttgcggctctcctcgaactccttcgggctgaagaacagaagccacgtctccagcgctgtgggcagcacgaggccgatgagcacgagcccgatccagaacagcggcgcgtatccgccgaccagcagcgacatcaccgagttccagccggccgtggaattcgtgcacgtgatgaacatgagcgcagcgatcagcacaagctcgatgacgggcaggcagaagtggaacttcttgagcacgcccacgcggttgaactcgtcagcgtgcctgaagatgccgatgagcagcaccgacgccgcaccggtggacatggccgacacgaggaacaggatgggcagcagcgcgttgttccacagcgggaacgtcttgcacacgcccagcagggcgcccgtgtacatggccacggccacgccgaacaccacgccggcgatatcgagccacaccggcacgcgcttcttcatgaagtcgaggaccaccacgaccagcgatatcaccgtgaagccgccgaggaacacgacgccccaggtcatgaccgatccgaagttcgtcagcagcagggcgaagcgcagcgggttcatgaggcccgccttcgcatcgaacatcagcaagcacaggccgatgatcaccacgataggcgccaccagatgcccgatcttgcgcatcgacacggcctcgggatgtcgccaccccagaaaagccgaggtcacgaacgcgccgccgccgagaccggcgaggaacagataccatgcgatgatggcaccccaaataggttcaaacgtcatcgttcatcacctcacgtaaaatactttggacttggtcaggtcgcccgcgataggctgcgcgttcgtcgcgacgatctccttcgagatgtcgctgtccgggtcgtccagatcgccgaacatacgcgcccccgtcaggcaagcctccacgcacgagcacatcttcgtgcccgtcgtctcggccgacaccgtgcagaagcggcacttgtccaccgcgcccgtctcctcgttgcgcacgcgcacctggtaggggcacgccgccatgcagtacaaacagccgatgcagcggccgtggtccacgcccacgatgccgtccgcgccgatataggcggcgccggtggggcacaccgccacgcagggggcgtcctcgcagtgcatgcactgcaaaggcaccgtctccacgcgcacgttgggatacgttcccacctcgtgctcctcgtaacggatgaagtcctcggtgggcaacaggttgttctggcgctggcaggccacgcggcaggcgtagcagccgatgcacttcttcgtgttgatgagcattccgtagcgagccattacgcacctgccttcttaacgttgacgaccgtctcctgcgtgcaggccgacccgtagcccggctccatgcggaagggaacgtagtccatctggcgcaggcccacctcgtaggcggtgtgctggtcgggcgacgagcaaccgtagtggctgggcatgtacaacgccgtcgggttgatgcgctgcgtgaccttcacgcgcacgcgacccgtgtgctggccgttggacacctccacctcgtcgccgtcggcgatgccgcggcgggcagccgtgtcggcgttcatccacacgcgcgtgaggtcgtagtccttcgtgatctgcatgaggtcctcgatgttggccgtctgggtgtggctgtggatggcctgcttgccgccgatcaagcgcagctcgtcgcccatgggcatgacagccggttcgacccacaccggatagggcgacagccccgccttctcgcacgcctcgctggcgaactgcaccttctcggtgggcgtcttccacttcggcgtggagccgtaggagaactccttttcggggaagtgcgccgtgcccgtcttcttcagcgcttccagcgacagccccacggtttggagctgagcgtcggccagctcgtccacgctgaactggaagtactcgcccacgccgcacgcctcggccagctcggagaagatctggtccaccggacgcgtgttgggatgcaccttctccagcacctggtcgcgcagcgcgacagccggcaccttgccaccgatgaactccggcagctcgaggcgctcgaggtagctggtatcgggcagcacgtagtcggccagcagggccgtttcggacatctgcacgtccacgaccaccatgaggtccagctgcgacagcgcgtcagccaagtacgccgtgttcgaataaccggcggccatgttcgagttgtagaagaacatgcccttgatgtcgccgttcttggcctgctcggcggcgaagaggttcgtgcccatgctggtcagcgccagcgggtactcctcggtgccggcgatcttgttctcgggcttcggcacgctggggaacttctccttgtccacatcgcccgcagacacgctgggcgtgaagatggcgccgccctcctggttccagcagcccagcagcgtgttgaacaggcatactgcgcgcgccgtctcgccggagttcgcgtacgagcagccgaacgcgccgcgccagctgggctcgatggacgccgcgggggccgcttcggcgaactccacagccaaacgcgcgatagtggttgcggggatgccggtgatcttctcggcccattcgggcgtgcagtcggccagcgacgcggcccaatcctcgaaacccaccgcgttatcggccacatactgcttgtcgtacaggccgcgcgtcaccagcacgttcgacatggccagcaggaaggccaggtcggtaccggggttgataggcacccattcgtcggcgaacgcgatggagttgttgcagcgcggatccaccagcacgatatgcgcgccgttttcgtgggcgcgctgcagctctgccaccgagctggggcgaatggcgtcggcgtagctgcggccgatgaacatcgtcatcttggagttctccatgtcggacgcatagctggccgcgccgatggcctgggtgaagccgctttccttcgacagattgcaggcagcgccgtgcgtgtacacgttcgccgagcccagcgcgttcatgaagcgcttcgtgtagtacttgcccgacggacgcggatcctgcaccatggcaagcgcctgcggccccttgtcggcgatgatggccttcaccttctcggcgatctcgctgtaggcctgatcccacgagatggcctcgaatgcgcccttgtcgttcttcttgagcggatcggtgaggcggtccttcgaataggcgatctgggaatagccgtagccacgggcgcagagcttgccctgggcgtacggatggtcctcgtcgccgataagcttcgtcaggcgcccgtcgacgacgtacgccgtgaaaccgcatttgctcgagcaggcgttgcacagcgaatggacggtcttggtttctcccccttgggccccgtcatcagcgtgcgcctgctcccaagcgtcgaagctcacatagccggccgccgccgtgagcgcgaccgctccggcgctgccagccaggaagctccgcctggttatagcgtgttctgacatagctgcttcctctcttatatgcatgcgtgtaaacgattgcgttcggcacgcgcatccgcgtcgaccccttgctcgccagcacccgacgtcaacgccagatgctcccgcatgcccacgagcacgtcgaccagcccgatgtagaaccgggcgtcgtcggcaagctccagcaggcgcatgcgatacgcggtgagccacgagaaccgctccaaaacgaattggcgggcggcatctcgcatccccgaccgcagcagcacggctgcaaggtcgagctcgagcgccagatgatccgggcacgccgaaaattccggcggcacccgcatgcccatgcgctccacgagatcgcgcatatagcgcgccgaatctccctggtacatgccctcggctttcgagaacggagacggcagcggcccgttcgaccacgtcgtgtacaacgactctgccggcactgccgattccggcagccctcccgtgaagtggcgtgcggcgaacagccgcttctcgtcgtacgtcggcggcgtgaacagcgccttcacctctccggcggaaaggaactcctgaagcgggcagcggctgcggacgcgggctatcgggctggtcggctcgccgagcgcgtcgtcgtcctgcaagccgcgccgagcggcgtcaagaaaatccgaccacagcgggccgtctaccagttgcttccactcgtcttgcccgacgggcgcgaaacacatcgacagcaccgtgaacatctcgtcgtattccatggcttttgcctcctttccgcatctcttcggatcggccgcgctttcagcgggccgaaaccggacatgtccagcgatcgcgcctacgcttgcacgagggtcgtcgtcctcacgacgccctggtcgatgaccttctgcgcgatatcctcccaatcgatgaacttgatggcgccgttcgggcactgctcggcgcagcgtccgcacgaaatgcacttcgtggatacgccggtctcgctgtcgacgcgcggcatgttccacgggcacgcctggctgcacatgccgcagccgatgcacttcttcgtgtccaccgtgcgcgcaccggactcttcgtcggcgtagatcgcgtggaccgggcagtagttcatgcatgccgggtcggcgcactgcttgcagtgctcgacagtgaactcgcagttatcgtagatgccgtccttggtatcgacgctggcaccgaagttgtagttcggccacacgcgcacgcgggctatgtgctggcacacgcgaccgtcgttcttcagcgtgcacatcatctcgcagcgctggcagcccgagcagcgggcacggtcggtcacgatcatcttcgtgggcgtggtgcgtatctcgatgcgccccgaagcgatcgaggccgacgtgacgccccacgatgccagcacgccgccgaccacgaggccggcaacgccgcagccggccattgccagcaccgtgcggcgcgtaaaggttttctgcttgggctcctcttcgggcccggcgctctgaggcgcgggcgcggatgcgttcgtctccggcgcagcggccgggaagctcgtatcctcggaggtgttctggttcagattggaatctgacatagcctagtgctccctccctcacataggtacggtgagtgtcgttttcctcgtcccgtcgtcgcgcgagtgttcgatgccccttttaggggaaccgccccgaatggaacgttcgcggcgacggcttgcgctcgatatcgctccgcgcgcagccccacacaacgcacgaaagtataggatggccccgtgcacggcccctcccctctttgaggtactttttaccgctgatcggctagttcctcaaaataccctcaaagaggggatgtctcgtccgcctctgtcggcatactggcgaacgacgattgttgtcagcgctcgcatcgcccacgcaggttcccacacaacaccgaacctcagtaatctatccaagatttggagatgcaacatggctgacgaaacatcgtatggatgggccggtaagatcctccgcgtcaatctgagcacgggctcgatcacgacgcagccgaccgacccctacaaggagtacatcggcggcatgggcttggccaacaagatcatgtacgacgaagtgcccgccggcaccgaccccttctcccccgagaacaagctcatcttcgccgtgggcccgctgacggcttccggcgtgcccctggccggccgcaccaccatctgctcgctgtccacgttcacgaaggatcatcttgtggtggacgcccactgcggcggcatgatcggcgcgaagatcaagctggccggctgggacgccgtggtgctggagggcgcgtccgaccatcccgtgtacctcaacatcgtcgacgacaaggtggagatcaaggacgccggcttcgtgtggggcatgggcacccgcgaggccaccgagatgctgaaccgcaaggaaggcgtcgaggcatgcgtggccaccatcggccccgccggcgagaacctgctgccgtacgcgtgcatcatcaacgcgcgcaaccactccgccggcgccggcacgggctcggtgatgggctcgaagaacgtcaaggcgctggtggtgcagggcaacggcagcgtgaacgtgaaggacccgcaggcagtggccgacctgtccgactacatgctgcgcgaggtcatcggctccaataacaaccacgtggtgccgcagacgcagcaggaatgggccgagttctacgacaagggctcccgttggtccgcgcgcagcggcctgacctggggcatggcagaaggcggccccatcgacacgggcgagccgaagccgggcgagctgaacacggtgggctatcgctgcatgaagtcggtgtacgacctgggcgaggtggccgagaagtacaccatcaagatggacggctgccacggctgccccatccactgctactccgacctgcgcaccgagcgtaccggcgagctgggcggcaagaccacgtcgggcaacacctgcgcggccaacttcccgttcaagtacatggagggcatcctcaagacgggcatcgccgaggacagcgagtcgggcattgtatggaacacgctgatcggcaccaccattgacgagttgggactgtggtgcaactacgcgcagctgtggcgcgacctggcgcactgcatcaaggctggcgtgttcgaccgcgtacttcccgaagaggagaaggcgaagtacgactggcagcgcatctacaacgacgaccccaccatcatggtggagctgctgaacgacatcgcccggaacgactccgagatcgcccacatcgcctacggcccgtaccactggaccgagcgctgggacgacaagggctggttcgatcagcagcccagccagctgatcaactaccgcggctggcccgtgcaccacgccatcgagtgcttcggccaggtgggcggcgtgtacaacatgatgttcaaccgcgacgacatgatccactcggccgtgaacttccaaggctgcggcctgcccttcgagctgaagcaggaaatcgccgaagaggtgtggggcggcaaggacgccatcgaccagaacaagaactacacgcccatgaacgaacgcaaggcgaacttcgcctggtggagcgtggtcaccgacgtgctgcacgactcgctgacgctgtgcaactggacgtggcccatgaccatgagccccacgaaggcgcgcaactaccgcggcgacctggacctggaggccaagttcttcaaggccgtcaccggcgaggacgtgaccaccgacgacctgtaccaggccggcgccagaatcatgacgctgcagcgcgccaacaccgtgcgcggcatgacgaaggaagacggcaccaggggcgagaacgacatgcgcaacgtccatgatgtgatgtgcgcctggacgttcgatatcgacccggacaagaagcccttcaccgagggcaccatcaagatggaccgcgacgacttccaaaccgccctgggcatggtgtacgacacgttcggctgggatcacgagaagggctgcccgacggccgcctgcctcgaccagtacggcatggccgacgttaaggaagagctggacagcctgggtctgctgccgtagagcaatcctccgcagggccgcaacccctccgcggctttcgcccccctaccagaacgcccccggatgcagcatccgggggcgttctcgattgagcgggaaaggcggccgaagaatacgacgacagccctacgcttcggccatcttcaactccactctcgtggatctcaaagaacagtgctcgcagatcatgcaggggacgctcagggagttgcaggggacgaccgcgtcaagctcttcgagggaggccccttggcgaacgagataatcgccgatgagggcacggacggcctcgatggcgaaatggatagtgtacaccttgtccacgggaaccccgtcgagcgccgtcttcacgtcgtcggtcgtgatggccagcgcctcgtcgaacgtacatccttcgagcatggagcacaccacgctggcgcaccccgtgacggccaggcagccgcgcgtcttgaagccggcgcgcacgaacgtccgcgtgtcgtggtcgatcacggcgaacaggcgcagcgccacctctccgcgcttcgacttgcccaccatgctctgggcgttgaacccttcgggggcgccgccgttgcggaagttcgcaaccacggacagcagcgtgtcggagtagcccgtcacgccgtcctcgatctcggtttggtacacgtcggccgtgcgcagcacatggcggtcctgcacctcgcggtacacgttgcgcgcttcgtcttccatggagaacctctctttctagcaagatcctgcaactccgcgcctgcagcgcttcgctcaggacgactaatgcaagtacgccgaacgggcgcgatagcgtttacagaaacatgtcgcgctcgacggagttccactctgcgagcgacttggcgtaggcgggcgtcaggtactcggtggagaagtagtacacgtcgccgttcgacgcagcgacggtatcgaggtccggataggcgccgctgtcgcgcacggtgcgccacaactcgtcgatttcatcggccgacaggttgaacggctcgttggacagcgacgacgcctccatggggcgcgggtacttccgcgattcgtcgcgcacgcactccacaaacgtgagcacgcgatcgtcctcgctggcgaggaacgaccaccgcgcgtacgcatcggtcatgcgctcggtggagtacagatagtagctgtgcttgccgacgagcgcaacgatatcgtcgcagggaacgcacgggggatcggccagggtttcggcatcctgtgcgctatcgcgccgctcgggatccttcgactccgcgccttcggcgctgcgctcaggatgacggagctcctctgaggcttcggagctgcgctcgggctggcgtggctcttctgcgcccttcgccgtcgcagcgccttccgactcgggctcctcctccgtgcgcagaatgcggggaacgcccaccgcacgggtcgccgtgcgaacgggggtcgcggaagccgcaacgacgcgcgcgtcgcgctcagccctgcgatcctcaaggtactcgtacacgaacatctcccagtcttcggccgagaaatgcgccggcacgaggcccgccttcaaccactgcgccggctgaacaagcttggcatccgcagactgcgcgcgcacgtcatcgaataccgccgtcagaaacagacgctcgacctcttcgtcgctcaattgcgcctcggcaacttccccctcgcgactatcggcagccgtttcggcaacacgctcccatgcgggcatcgctattggcgcgctgacgctttccgcttcgtcgggaaccttcaaaccgagcgattcgatatcttctccttgttcagccattgcccggatcacttcgtctcgaattcgctgagcttctaagtcaaccaccgcatcgctcctttcccctgcgttgtttttcgtatggtatgatgacccacggcgcgcatccgccatcccctctttgaggataaatcgaggtgaatggaggacgcgtccgcgtcgactacgtaccaagcacggggagggagtgtacggttgggcgcacgcacgacaacagcaccgactccaacaggcgccgagcaaaaccaggcccgcaacggactcgagggagcggcacatcgcttcgcgccgctctggccgcttatccttggtctggctttcgggcgggccggactgatcgtcgccagctatggaagctacaccagcaccgacgaaggtattttcaccgacggcgccatgctggtggcattagtcgtcttggctttgttcctggtcttcatcgtcctcagcaaacgaacgatcagcaagcacgtcaccaacgtgatcatgcgcacatgcgtcgcactggaagcgtttgtgctgatggctctcgccgtattcgaccttttcggcatcggcgacgaaatcgagcgcttcgcgctgagctcgctgtgcaccctcgtgtcgtcaggcgccatctattattggctgcgccgcgcccgcggaacgagcacgaccacggctgccgtcttcgtgttcgccgcgctcatcatcagcgaagtggagatttatctgtgcacgctgctgcccgtattcgcgggaaacttcgttgccgccgcgctcgtgctgctgcaatacccctgcataatatgggcgcgcaggcaacgccaaccgcatgacatcgtctcgccaacgcaggccaacgattacttcggattctcaaaaaccatgttgcaaagcaagcagttcctcactgccactgcactgggcatcggatgcctgtctatcgtaatcggcttgctgcgcggctaccccgacggcacctccatcgcgttcacgcccgctacgcgcatcgcgtacgctgcgctgaccatcggcgtgagcgtcgcgttgatcgtattggtgctgaagtggcgagaacgcgtcatgaccgtagggattttcgtgatcatggaactgctggcctgcttcgcgctgatcgcctatgccggatttcccgacatgctggacatcggagcggtattcaccaccacgctcaacgcgctcatggtgggattcacctggtacgtcatcatcgcgttcatgagctacggatggcgcgacccgtactattacgccatcgcaggatggctggtgtggctaggctgccgcgccgtagcgcgtatcgcgttgctggcggctcacgagctgttctccaacgacatgctcatgagcgccgcgatgggcaccatggtggtcctctccacgcaattggtgttcgtgcaattcctcaatatcacgcgtcgcaacgccgaggaacaagaggagcagagcgcacgacgacagagcatgctcaagatcatgggactcgacgaacacgaaagccttgcggacatgcgacaggcctccatgaagcacaacgccgaagagatgggcaagcagttcctgttgtccgatcgggagatcgaggtgatggcgctgtatgcgctcggctacacgcagaagcgcgtggccgaagagctgttcatcacgcagggcacggcgcatgcccacatcaagcgaatctacgctaaaaccggcttgcactcccgtcaggagatcctcgactatcttgaacagtacgcgtcgtagaataggatgccggcgctcgccgcgcatacggcatgcgtcggcagacgaagagacgaaagaagaccctgggggaacgggatgccgaatctcatcgacatagcgcaacgcctggccgagcgaccgatggtggcgctgctgcatgaagagcgctgtctgccggagcgcgatctgggctccacctgcacgcgttgtgccgaagcgtgcccggtcgacgcgatcgccgtcgggttggagcgcgatacggaggcgtcgcccgccgccgcatacgggtccgtggcgaaaaacggcccggccggaccgcgcatcgacgatgacgcgtgcgtgcgttgcggccgatgcgtcacggcgtgccccaccgccgcgcttttggcgatagcaccgctcgacgacgacgcgctgttggaagcgagcgtgcgggcgggagccgcggcggcgaagcgggcggcgggttttgcagcggaagaggccgagggtcagggagattcgatcgggacgcgcgatgcggaagcccaggtcgaggccccgcaagccgcagtcgctcccgcttgcgctggattcgcgtgcgagcgcgctgtgcgcgcaggccacatcgatgccgagcgcacggtcgcccttccctgcctggcgtgggtggacgaagcgctcatcgtgcacatggcgcgcgcgggcgcgcggcgcatcctgctgctgacggctccgtgcgcctcgtgcgagcacgccaaagccgtcgtcgacttgccgaaaacggtgcgctcggctcagcgcatcctcgacacgtggcagctcgacgccgctgcgagcatcgtcgaaaccgtcgacgatgtagccgcgtccgaggacgaggacgccgctggcgaagtgtcgcggcgcggcctgttctcgcaagcgcgctcggcgctggtggaagcggccaccgatgcagcgtcggcgcagatggacgcgctgaccggccgaagcaccgccgacgctcccgagcccgagcccgaccgccgccgctggcagctgctggacgacctgcacgccgcgggcctcccggctggcgatgccgtcgtgccgcgcgcgcttgcaccgcgcgtggacatcgatcccgagcgctgctcgggctgcgcgctatgcgcgggcttctgccccacgcaggcgctgcgcaaagccggcaaagcgccaggtgggcgcaccctgctggaattcgatgccgcgctctgccgcgattgcggcacctgtaccgatacctgccgctacggcgccatctcctgcgaggagacgctcaccgtctccgagctgttcgcgctcgagccgcgcgccatcgtcatacccaagcgccgcgtgcttcccaaccgccgctgaccgcggacgattcgcaacaccgcccgcctgctaccataccccctcatcagaaaggaaccgacgccacgatgctccacttcgacagcgactatatggagggtgcccatcccgctatcctcgaacgcctggccgccaccaacttcgaccagacctccggctacggcaccgacgaggtgtgcgccgccgcccgcgagcgcatccgcgaagcgtgcgcgtgcccgcacgcgaacgtgtacttcctggtgggaggcacgcaggccaacgccgccgtggccgaccagatcctgcggccctgggagggcatcgtgtcggcgaccaccggccacatcaccgcgcacgaagccggcgcggtggaggcgtgcggccgcaagacgctgccgctgccgcacgtcgacggcaagctggtggccgccgacgtgcgcgcgctgtgcgaggcgtactggggcgacgagaaccgcgagcacatcgtggcaccgggcgccgtgtacatctcgcaccccaccgagtacggcaccgtgtactcgctggccgagctggaggcgttggcgcaggtgtgccgcgacttcgacatgaggctgttcatggacggggcgcgcctgggctacggcctggccgccgtgggcgccgacgtcacgctggccgacatcgcacgcttgtgcgacgcgttctacatcggcggcacgaaggtgggcgcgttctgcggcgaggccgtggtgttcacgaagccggggctggacgaccacttcttcacgctcatgaagaagcgcggggcgctgctggcgaagggccgctttctgggtttgcagttcgacgtgctgttcggccaggaggacggcgagctgcgctaccagcgcatcgggcgccacgccgtcgagctggcgcagcgcatcgccgagggcttccgcgcgaaggactacgagctggccatcgactcgccgacgaaccagcagttcgtcatcctggacgacgagacgaaggagcgcctggccgaacatgcgtcgttcggcttctgggagcgcacgcccgacggccgcaccgtcgtccgcttcgccaccagctgggccacccgtcccgaaagcgtgaacgagcttctggcgctgctgtaacacgataaaagccccggctcgctttacagcgagccggggcttcgttgcgttcttagcacgagcgctcgtgctacggctgcggcacgagcggcgggaactggggcagcttcggggttcccatgcgcaggctcagctgcacctcgcagggcttgcaggcctggctcaactccacgtcgctttgcaccgacatgtacatatacgtatcgacggcatcccaacccgtgatgcgcatgagcaggcgctgcatctccttcgagacgttcatcagagcctcgtcgaactcctgcgcgctggcgttcacgtaccacttgccgtgcgggccgaacgtctccagcacgggccagttcagctcgaagtccttcaccagcgacaccttcaccgtgatctcggccgcgatctcgatgcccgtgccgcacagctcggcatcgcccatggtggcgtgcacgtcgcccatttgcagcagcgcgcccggcacgcgcacggggaagtacatacgcgtacccttcgtgatcagcttgttgtccaggttgccaccgtgcgcgcccacgaagccatcgatgacgtcctcgccgtcaggcgcggtgccgatgacgccgatcatcgggtcgatggggaacttcacgccgttgaagtcggccatgccgtcctcgatggggatgatcttgctgcggtaatccgtcgtttggtacagcggtccgcagtggtcgtcggtggcgattacgccatgatcggccacttgcacgtcgtagatatccaccaccagcacgtcgcccggctcggcgccctcgatgtacacggggccggccgccgggttcgtgaacccgtacgagaagttgagatccttcatggtgacatcctcgttggggatgcgcccggcgaagcaatcctgcgtcttgaacagcagcacctcgcccggttgcgcggtcgcgcacggcgcgttgtccttggaaaacgccagaacctgatcggtgataacctgcatgaagtcctccttctacgacagccccagccacgtggcgaacttcggcacgtagcccatgacgaatatgatgatgataagcgccggaatgccgaacttcagccacaatttcgaccaagccgggaatttcacgcccttgcccgtgtcggcctcagccaggaagttgtcccagccccaaccgcccttcgtcacacagaacagcacgtagaacaagctgcccagcggcagcaggttgttcgacacgatgaagtcctcgatggactggatgtcgccgatggccggaacctgcacgcccgccagcacgttgaacccaagggcgcacggcaggctgagcaccgtcacgatgatggccgtgcgggcgaccgccgtcttgcgcgtccaattccatttgtccatcgaccagctgatgaggttctcgaacaccgcgatgatggtggacagcgcggcgaagctcatgaacacgaagaacagcgcgccccacagctgccccggcggcatctggttgaacacgctgggcagcgtgacgaacacgagccccggcccgctgcccggctccaccgcgaacgcgaagcacgccgggaagatgatgaggcccgccacgagcgccaccgcggtgtccaagccgcagatgcgcagcgcctcgccggtgagcgatcgctccttgccgatgtagctgccgaagatttccatggccgagatgcccagcgacagggtgaagaacgcctggcccatggccgcgtataccgcgtcgccgaacgtggcccattgctcggccgtcgtcgcgcccgcgaacagcttgccgaagtcggggatgaggtagaacttgagaccctccaagccgcccggcagcgtgaccgcgcgcaccacgagcacggccatgatgcccaacaggcagatcatcatcaccttcgtgatgcgctcgacgcccttctgcaaccccaggctgcacacgaggaagcccagcacgatgaccacgagcatccagcccaccaactcggtggggttcgccagcatgtcgttgaacacggcgccgacgcccgcgctgtccaggccgttgaacgcgcccgtgcccatcttcaccacgaacgacagcatccagccgcccaccgtggtgtagaacatcatgagcaccatgcagccgatgtagccccaccacgagaaccaatgccactttcgcgacggctgcagcgtgtcgaacgccgccgccgagctcttctggctggcacggcccacggcgaactccatcaccatgacgggcaggcccaggatgacgaggaatacgaggtacatcagcacgaacgccgcgccgccgtattcgcccgtgatgtaggggaagcgccacacgttgcccagaccgatggcgcaccccgcggaaatcaagatgaagcccagacgcgagccgaaccgttcgcgcttggcgacgcccgctccggccacgttcgccgcgccggcccccttgccgttgctcataccatacctctcccgatgattcttgtacgaaattgcccgtaagaaaagcgttacgattgtagcgtaagaattgtatggttgaggcttgaatctgctggtcacttcaccttgagaggggcaactcgctccatgtcttcgtctataggaatgtagccaagcgaagctaagacgcagcgtcctacatgatagccaaggttgaccggcacggcattcccaatttgtttatattgatttgcgagacttcccgaaaaagaccagtcatctgggaaagtttgaattcttgcatattctctaaccttcagaggtcgtgtttccgatggatggcacctctctgtctgcttttgggcaggagcgcatgtcaatgttagactcggctgatcccacgacagacgtcgcgccataccggttcttcctccggaaagatgatagctgccccccatgtattcacgagcaacgtcatccggaagatcccgccagcaaccaccttcaggaacgcgctccatgaccttccgcttcttctcgggatattcttgaccctccgaatcgggacagccctccaatgcctgcttaagcgaaataaagtagtcacgctccttcgggaataagatcgggcaatcaagatcttttcgaactgcgaagataatgagcctctcgcgcttttgaggaacatcaaggtactgagcacgaagaatcttgtaattgaccctgtaccccagatcgtcaagcgccgcgagcatcgtcttcaacgtcctgccgccatcgtggcgttcgagccccctgacgttctctccgatcgcgattttcggctgcacaacatgaatagcgcgggcaaactcgaagaacagggtgcccctcgtatcttcaaaaccttttgatttacccgcatagctgaacgcctggcaaggaaatcccgcctgcattatctcggcctgataggggctgaattcgacatcgtgaacatcccgatcgtcaataacccaattcaatccatgagcatcgctgttgtctttcaacgcctgtgccgcattcttgtcgaactcgttcagaagtacatgattgattccagcattgctgaacccgagcgcagtgcctccggcgccggcgaaaaggtctatgcaggtcgcatcgtcgaatgtttcgtccgcacgcaggatctgataatcagtcgagtccccttcgccattgagcttgcggcgaaggcgatgcaactcggcaagattgaacatacgcttctggtttttatctcgcgttgactttataagaccgagtttgctccatcttctgatagtgtctgccgaaacaccgagcgcttgcgcagcagccgtcacgcttgcaaactcttctttacccatcgaccctcacttataaccattgcctatgtaatggttataagtataccttattgagctcagttcgttggcatgctgatcaagaaatattcaaacattccttcatcttcgaacggttctccctcggccacgtctttcagaatgcggggaaacgccatgtacagctcttgaagcgcattctctttgccaaacgcccacgtgtacgcagttgcaccatcacagcatcgcacggtttccttcacgggtcgccccgacactttccaaggacgatcgtatctttccggagtcttcggaacgatttggacgagataggaacttgaaccgtgcattttcgaaaacgattccaacttatcccacatatgcttctcatcagaagccttgatggtgttgtagcgattcttaacctcaacggcaatcggttccgcatcggaagactcccgaaccataagatcgacgtcgccgccgctgcatccaagatccttccatccctcggcaagcccgagaaccgcctggtgccagctgcccaccgcattcgagatcgacttgttgatagccctcagcttctcgaacgccatcatgctttcggcgctttgatcgaacagaaccgcctgtaccatgatggtgaaaggatcgggaggggtcttcaaggactggctagaggcaagcttagccaatcgctcgaaagaatgcttcgtgacttcgaaaagcttctgctcatttatccaatcgagcccatacgaatgatcacgatcactcatactctccccttaagactctgagcctgcataatggcaaaactcgctgtttttactagatcaagcatatcatctttccgcgaatgccgcagtgactttgctgatgagactaccctatccattagagcaagcagcacaaaatgcccgaacatgacgaggccaaaggaaaagatacttatctgactttcttcacgaaagttctccgatatgccgcaagcacgttgccgcgcgaaacccgtcgcgggcgcattataatgatgcgacgcagcctcgggggtcacgacggaggggatatggggaacaccgacaagcagcatggcgcagggcagctcggttccgaccgacgctaccttgtcgccgttataggcttcacgtgcctgtacgccgtgtgcgtgtcgttcttctattccagctggctggtcggacggccgggctttgcgcccacggcgttcgacaacgtgctgaatccctccatcctcgccgcttcgctgctgttctcgctgctcgtgcgttcgaaactgcccctcggccgcacggcgtgccttgcagcgggttacgccggcttcgcgctggcgttgggcggcacgttcttcgccgcgacgaagtcgctcgaccctgccgttgtcgccgcttcggcgatagcggccggcatcggcatgggactggtcatgcccttctatttcgaggcgttcgcacgctactcgtcgcgccgcatcgccatcgcgttcggcatcatgtcgttgggcggcatggcggcgaacatgctgctggggttcgcgcccgacgccgtttcgctggcagcgtacgcggtgctgctcggcgcgtcggcgctgtgcctgggcttcgcgtaccgtgcggaagccgatggaagcgaacgccgcgatcccccgtcgcatgcccgcggggcgctctcgaagcacgatttcctcaacgtgttcctcgtatcgggagtgtgcacgttcgcgctgtccatcgtgtacggcatcctcgacaccgcggcgacgggcaccagcgcctcgcccgccgcgtcgatcctcatctcgcagttcggaggcatcgcggcggcggccgtgttcctcgcgtacttcggaacccgttcgaagccgaacccgtccatgctgttcaacgtggtgttcggcatccttgctaccggcatcctgttcctgccgtttttgtcgaacgactacgccgtgtcgctgaacatcctggccgccgccggatggaagctcgtcatgctggcgctgttctacctcgtggtcaccacctacgcgcactgccgtacgaagctgctcgtgggcatctcgctggcgtacgcgctgccgcgcttcggcctgttcgtggggcagaacgtggcgcagctgctgggcgtgggcagcacggccgacttcgtgcgcaccacggcggtggcgttcttcctgctgtacctcatcctcatggtcatctggatggtgaactcgcacgagcgcaagcgcgccgaatcgcaggcgcgcgcggcggacgagctgctcgggcgtttcgcgcaggagcaggagagcgtgcgcaagctgcgctgcgacgcgctggccgacgaccacgggttgacgaaccgcgagaaggacatcctgtacctgcttgcccaagggcgcgaccttgcgttcatctgcgagacactgtttttgtcgaagaacacagtgaagagctaccagaagaccatctacgcgaagctcaacgtgcacagcaagcaggagatcatcgacctcgtgcatggggagctcgacggatctcgccgttaaagcaagctcatcctgaagttcgctttaacgattcccctcctataacccctgatcgcgcaccccacctcaaggggggtttcgcagtttcccgcttcgggtggggtgcgcgcgcccgtttgcgtccgtaaggtggtttcacgagatgcgccccgacggcgcatcgagcacgtgaaaccatcattggaggaggcagtaatggggatcaacgaaacaggagtatcgcgtcgctcgttcatcacgggagcggcggcggccggcgtgctggcaacgttgggcttggcgggatgcacaccgcaggataagcagaccgcatcggcggccacaagcggctccgacacgaaatgggatgaggagtgcgacgtcctggtcgtgggcagcgggtacacgggtctggccgcggcgcttgaggcgaagaacgccggcgcggacgtcaaggtaatcgagaagacggcgcgcgtcggcggcaactcggcgcttgcggccggcgacttcgccgtgtgcaactccagcgtgcagaagcgcgagggcgtgcaggattccgtcgagcagtacgtggacgacatgatggtggcgggcctgcacctcaacgacaaggaaaagtgccgcgtgatcgccgagaagtccaacgagacgtgggagtggaccatcgagatgggcgccacctgggcgaagaacgacaacgacgagtacttcctctacccgtacggaggccacaccgttatgcgttccatcgcgcagggcgacggcggcggcgcgaacgtcacgggccccttcgccgagaagctgaagggactgggcgtcgaagtcgagacgaagcgcatgctcaccgagctggtgaaggacgcgaacggccgcgtgatcggcgccatcgtgcacgacaagcccagcggcaacgacgtggaaagcggcacgcccgtcgccatcaaggcgaacaaggccgtggtgctgaccaccggcggattcggccgcgacctggcgttccgccaggcacaggatccgcgcctcgacgactccgtggattgcacgaaccaggaaggcgccaccgccgaaagcctgcgcgcttcggtggccgccggcgctatggcggtgcacaccgactggatccagctgctgcctttcatgagcccggacgagcagggctacggcgtcgccgccttctacaccgacggccaggccagctatgctcccacgctggacgtggccaccggcaagcgcatcgtcaacgagctgaccgaccgcaagcgctacgccgacgccatcctgaaaaccggccagccgtgcgtgcagatcacgtgcaagaaggcgctgtacgacggcggcagcggcctggagggcgcgctgaaggccggcatcaccaccgagttctcgtccatcgaagaagcagccgagcactacggcatgccggttgatgccgtgaaggaggagatcgcccgttacaacacgttcgtggcgaacaagctggacgaggacttcaagaagccaatccccgacgacgcccaaaccatcgacgagccgccgttctacggcgtgcgcctgtggccgaaggtgcaccactgcatgggaggcgtgaaaaccgacctcgagtgccgcgtcgtcgacatggacctgcaggtcatccccggcctgtatgcagcgggcgaagcggtgggcggcatccacggcgcgtgtcgtctgggctcctgcgccacggccgactgcctggtgaacggccgcatcgccggccaaaacgccgccaaggagcagggcgcctagcatctgcgcgatgcggcgtgccgacccccgctcgcacgccgcatcgtttgtcgcccgaaagccgcggttttgccgccaagagcgaggctttcatgcgacaacgcgccccctaccaaccaactcgcgccgccccgcctcccggaagggcgacaagcgaacccccgaccaagcagcggctcgaatagaagaacgaaaacaagcggaaccgccgcaacccttgctactcctcgtcgtccaccttcgtctcgaacgtgaagcgtgcagcctgcatctctttgaggtacgccgagcatatcctcagttcgcggccgtcttcgagcgtgatggcgagcgagcccatctttccatccgtatcgagtcggataagcttcattgacgagaccgacagcgtcttgatggtctgcccgtcttccccgcgctccttgaatacgatcggcttcgtcttcgtgaacccgaatgcgtcgcgaatctccatctcgctcatgtcggccgtctcaaacattgtcatcaccgttccttacctccgagtatagggcgccgcgcgtcatcctctcgatgccctggaacgaagggtcgaccacgcaaccctccgcagcaaaaaaacaacgatcgctaccgtagtatataatctttttaatcattgatgacgaagagctgttctaaagagcgcgcccgcaatcgcccagatgcgagcaaggccgaagacgggacgaacgagcttcccgcgaaacgcagcaaacaccgccgcacccagcggcggttccccatcgttcgcctcgcgccaacgatcatgcgctgtcgaatgctattgttcgagaaaaatcgacaccacgcactgacagaaaagacccccggggtcttttaccaagcgaacgccggcgtttgcgagagcctcgcagctgcaaacaccggcagcacaaggcagcgctacttgtacgtgatcagcaccagacagcacagcaggctgtctcccatgccgctgggcgacaactgcacgtccaggatctcgtagccctgcttctgcatgaactccagcacgccgttcaagatgcgcgacgtgttcttgcggctgtagccgcccgccatttcaaacgcgcccgcgtggaccatcccgtctttcgggcgcagatccatgttctccagatacgttgccagcttctccagcgctttatcctcggcgctcttacccgtacccatgaatcccatgcttcagaccccttcccttctgcgacgcgccctaccagcgcttcgcgatcgtcacttcgttgcacccgtcgacgtagcggtacgaatgcgcgtccatcagacgcttgaccatcatgatgcccaaacccccgatgggagtctcctccaccgagcggggagcctcggggtcggcgtgcccgaacgggtcgaacggcacgccgccgtcgcgcagcaccaccctcgccccgcacccgtcggacgcgagagacaccgacacctccacatcgcccgacccggggtcgtacgcatagcgagccacgttcacgaacagctcctccaccgccaagcgcagctccttgcgcgccttgggcgggcactccgtcgtttccaaagcctccgtcaggaaccgctgcacggcaggctcgttgcccaacgccgcctcgatgcgcatggtgcacgtctccgccgcctccaccttcctactccacgtcgaagacgtcgataagacccgtgatgtcgaacacctcgcgaatgtcgtcgctggcgttcacgatacgcagagctccttccgcggctgtgacccgcttttgcgtggccaccaacacgcgaagacccgccgacgacaggtactccaggtcggcgaagtcgagcaccaccttgttcgtgcgctcgaacaccggctcaagagcctcctccaaatcggcagccgtattggtgttcagatgccctcccaacttgagaaccgcctcgcctccgaaatagtctactgcgatgttcacatccatggttaccctcgattcccggccgccgacgccgcggggccgttttcctgtccatcgtagcgcagcaccagcagcgtgatgtcgtcggcctgatcggccccttccgcaaaggcgcgcacgtcctcctcgataacgcccgacacggatgccgggtatccgtcgcactcccgctccaccagctggaacaagcgttcgtcgccgtaacaatgatccgacgcatccatggcctcggtcactccgtcggtgtacaggatcagggagtcgccccggatcatggtgcgctcgaacacgcgatagggcacaccctcgaagctgcccaacagcagacccgaccggtcgcgcatccactcgaccgaaccgtcagcgtgtcggtacagcggcgggttgtgcccgccgttggcgtaaaccaatttgccggatctcaaatccaacaccccaagccacaccgtaacgaacatgccggcttcgttgtcctcgcacaggccgtcgttcgctcgagcaagcacctggtcgggcgagaggtcctcgcgcaggagctggttcagcagagccttgacgcgcatcatgaacagcgccgccggtacgcccttgccggatacgtcggctattaccacgccgcagtgatcctgatctatcaggaagaagtcgtagaagtcgccgcccacttcctttgccgggtgcatggatgccgatagcccgaagtcatcgcatcctgagaacggcgggcgcacggtgggcagagccgaaagctgaatgcggctggccacagcgagctcggatcgcgcccgctcgcgctcggcgcccatgcgcgcgatgtcgtccatgtgagcctgcagctcgtcgatcatgtcggccgtgctggcagccagatcgcccacttcgtctttcgggtagcactgcgagcggatgacgtcggccacggccgcggacttgctggcagcgtagtcccgcacctgggagctgagcgctacgagaggtttcaccaaggtgcggcggagcagcagaagcatagccgtcaggcaaaccgcgaacacggcgaacgacaccaccaccgtgctggcaacctgcgatcgcactgcagcttccagctcgtcggtgcccatcgacacctcgtaaacccaggtctggccgtccacggcaaaaggcacgtacatagcgtacgtttcgccgtccggcgcaagggcgggatccgtgctgggctcgccggtttcgaccgcttcccacaaggcggggtagtcagctttgaggcgctgctcctcgtcgccgaagaagtgagcatccaccccgcgcttctgatcgccggaaatcccctccgcaacgtagaggacggtctcgttctgctcgtccggaacaactaccgcaagcctcgacacgctgaacgaagcgcgcagccggtcgagcatcgcgtccagggaatagagcgagaggggtatgctttttcgctcgtactccgccagcatgccgtcgagacgatcctgatcctcctcggtcgcctcctcctccgaccccttgagcctgtcgacttcggcattgtaagcgcttatcagcccctgcgtttccgcgaggctctgatcgtacgtcgtcgcggggtccaactcgtcagcgttgtctttccacgcttgcaatgcatccgaaggaagcgcctgcggagtggcgttcgcggcgtaaccgcccacctgccccaagcggtaggcttcggactgcaggaaggtatcgcgcgtgctgacgtacgcgagtgcgcagttgagcaccacggccactacggcgaacgccaggaacacgagcgccagcttgcgaatgagccttcccgcatgcccatcgtttcggccggacgaccgctccacccgcctttcgtcgtttttcacgcagcacccccgcatcgcgtcttcatcgcatattcgttcgatcataggccggtcaggcgatcgctggcaaggcgcgccgaacgaacgaccatttccagcgaacgaaggacgagttcagcgagcgaaggcaaacagagcgagcggctctcgccgcacagcgagcggctgaccttggcatcgtgcatgatcgttcgttcgccgggatcggtctttcgttccgcgctgcttgccttcgcgaaggccgtttctatactgaaggaattcgaaacgtccggcacgaagccgagcgccccctggacacgagaaaggcggataggctatggatgactccaacaaagacgatcacgcgaagacccttccaaaggagcacgaccgcgacgcggcaatcgacgacgcgcggaaggccccggaagagcttgaagatgaaggcttagatgccgtatcggccgggtcgggcgaatggtctcgttttgggccaggcatccccccgaaacccgtaccccttcagtaacaactgccctttgcaacctggcaccgctcgtcatcaggcactttcagacgtctggtagaagccgcacccatacttcgcctcatcaatcctctacgataaaggacacgctatgagcaatccagcgcgtaccggaacccaaaaagccctgcacgtcgtgtccatcatcatgatcgtgctcggcgtgctggtaatcctatcgggcgcctccctcatcgcgctcggagtgtcggccgccacgatgggaatggaccagccgatgactttgggcgataccgagaccacggcagacaccacctccgtcgctctgggaatcatcgtcctcgccatgggcttggttcagctcgtcgtcgccgcattcggcctgcgcggctccaaggacgcaagcaagatcgggccgtttagaatcctcatctggggcatctccctggtcatcctggcgaccatcctgtacggatggtttttcaacggcaactggtacatccagaacagccctcttctgctcatcggcaacgtgatctacctgctggtgtgctccaccctcgccgacgcggtgaagagggagcacgacctgggcatcgtgggcgaggccaaggccgaagtcgagcgctcgggcagccagaaggcgctgctggtcatcggcgcctgcacgtggctggcctacgacatcatgcgccagagccgcggcatcgaggcgtaagcgcgagcggcccaggtgcccctgcacaggtttccgagcctgttgccgtagttgccaaaagagcaattgcaacaagaagtatatgcggtcacgagagaagggacgcggcgatggacgaaacgataaagcaggggaagggcgcgcttcgcttgctgctggcgactatgttggcggcaatgctgatcccctgggctccccgagcggcttgggccgatgaaaacgaagcagctgcccagacgcagacgagcgagatcgccgatctgctggctgccggagactacgtcgagggcgaggctctcgtcgtcgttgacaacgcggcatctcgaaacagcctccgttcgcgcagcgtcgacccgctctcctcggccgaaccgctcatggacgcgtcggccgaaacgtacgccaccgctacgggcgtcgacgtgccgttggaacaatctgtttccaacggcccggttctcctgcgcagcgcaagatccctacctgaagacgacgcggtgagcatggtgctggtgcggcaggagggtacctcaaccgaggatctcctgcgccagctgcaggacgacccgcgcatcctgtccgccgagccgaactacgtgcagcggctggacgaccccgatcagacggcgctcgatgagagcacgccgcaagtcgctgcggcattggggctggattcgtcggacgcggcgccgtcggctccggcgagcgcggatgcaagcggcacggccgctgccgacctgtccggctaccagtggggctgccgcaacaccggagaagtcatggtgcaagaagaggcgccgccccttgccggtttcgacatcgcgccgccgaattggaaccaggtcggcacaacgaacgccgccgacgtcgttgccgtggttgacactggcgtggactacaaccatcccgacctcaacggcatcatgtgcgacatgacgcagtacacggacaggggcggacgctacgggatcaacgtcgtgcccggcatggatcccaccgatccgatggacgatcattaccacggaacgcactgcgcgggcatcatcgcgtcgcaatgggatggcgtggggacgagcggcgtcgcgtccggcgtgcagctggtggccgttagggtcgcaggtaggcagaacacgatcgagagtgcggataccatcagggcatacgagtatcttgccgaagccgttgatgccggcttgccactgcgcgccatcaacaactcgtgggccggaaggacgatgagcaaagcattcagcttggcggcgacgaagctgggcgagaaaggcgccgtgaccgtcatcgggtcgggcaacgatgccgccgacgttgacaagataccgatgaccgcatccgtgctcgcgcataacccgtatgcggtcgctgtcgatgcgtcggattcttcagggcagctcgcctcgttcagcaactacggcgtggaaacgaccgacgtggtggctccgggcatgaacatcatgtccaccgtgcccctcggcagggcggcctacgctcccgaagccgacggctcccctttgagctacgagacgttcgaaagcgacgccccgtcggttacggcgcgcgcgacgccgacgtcgtccgaggatatagatgccgtcgtgcagggggcgacccatttcgatgcgaggggcggagctctgaagatccccttttccgaaatgctcacggaagagacggcgctgggcatcagttttcgaagcgtcgtggtgtcgatggaagtcgatccgtcgaaccaagagggcgtccggtacgtaggaatgaacgcgacggccacgaaccagaacaacgacaacctgctttaccaggttgcgataatgaaagacggcgcgcttgattggacgccgatgggacagacggctgtcgcggcccttgggaaggaccgaggttggacgaccatcgccttcgacgcccagacgcttgcccagaatgccggcggcaccttggcgttcgaaggcggcaagctgcaggtgcggctgacgttcgcacgcgccggcacgccgatcgccccgaccgatgccctgtacctcgacacggttggaacgggcagggccggctccgcgattccctatcaatctttgagcgggacgtccatggcaactcccatggtcaccggcgcggccatggtgctcgcgcaggatgtcgacggctccaccccggccgagcgcgctgcgaagctggcggcgctcgtgaaggcctccgtgcgtccggtggacgcgttctccggcaagtgctcgtcgggcggacaccttgatttgagggttgcgtcgggcgacttcgtcccggtggtgtcgggcgctcggatggaatccgacggcgacgccgcactcgtcatggtggagggcagctacttcggcgcagctcagggtgcgggaagcgtgcacatcggcggcaaggaggctgctgtgcgctcctggtcggacggctccatcgtaacggagtgcccacagggtctcaaaagcggcgtgctggtggtagaggtaacggccggcaacggcaagagcggatcgaagggcttcctgctgcaggttcccgagcgaccggacgaccaatccacgcccctgttcgagaagaccatagcgcttcccacgtcggatgagggcctgccggttggcgtgtcgtacggtcttctgaccgggctgggcggttcgctatacctgctgccaaacgacttcagcatatcgcatgcgggtacttatgcgctatggcgctacgaccccgatcaggacagctggacgcagtgcgccgacctacccgaggctctcagcagcgcatcgatgaccgtgttcgacggcaagctgtacgtatacggcgaagcgggcgagacggatggggcgttggctcctcgtcttgtcagctacgacccggcgacgaacgcctggacttcccatgacgcttcccgcctgccgtttcatgcgacgatagtgaactgcgatggagcgatgctgctggtgggcggcgccgcgtacgacggtgtcaaatgggtcgagctgaccgaaggcaacatcgccgtgtacgatacgcagacgggggcggtaacggctgcgggatccctcgcgacaggccgctcgactccctttgtcgtagcgcgaggggccgagctgttcgtcgccttgggcgatgtgcacgacgtgacgggctcttcgacgacgagccccgtattcgagcgcatcgtgagatccggcgactcgtacgttggcaacgacctgtccgccgccctgcctgcgcttgcgcccggctacgacgattcgttcggcttggcagcggtcaaagccggagtggtgctgtcgggccgtatcagcgtcgaagaagccgacggcggacgcgagctcgatcaggacacctatctgttggacttggcgaacggagacaaaagtttccaaggcatcgacaagcgcgcctcccgggtgccgctgtacttcccgagctcgacagcgtacgacggatggctgtacaccatgggcttctcggtctacgagaacggtggccgggtgatacgggccacgccgatggagacgctgccccaacccggcgacctacctgaacctggacccggccctacgcccggacctggccctgcagctgcgccggaaccggttgtcggcaagggggatgcaacgtctctggcgagaaccggcgacccattaggcgctttcgtgccggctatcacgctggccgccggtgtcatgctcgcaagcataggcgttgccacggctgcacgacgaaaagcgaaaaagaacaggctatgaagacggcagcggatgccaccggatcttctcgatgcgcgcaccagagcctatcggggtcaaaggaagtaaaagaaggatgtctttgcaaaaaacgaccggttattcgatctgaaacaggagataggttatgagcgaatccaagaagcacgactctttgagcgccgaagagctggacggggtggctggcggcgtattttttcggagggatccctccgaatcgttctgcccgttctgcagtatgagcacgaaggatcccaagtttaaagacactcacctatatcttggcgaaggagagcgtttctgcgaggtggaatgcaaaacctatcctggcgacgaaatctggtgagatatggtgaaggccgtcgagggatcgacggccttcacggaagaatggaagctcgcgcttacgcctcgatgccgcggctctggcgcatgatgtcgtaggccagccacgtgcaggcgccgatgaccagcagctccaccgcgccgctcgcgccgatggacgagagcatgccctgcgccgcgagccagacgtcgccggcgacctcgatggccaggccgatgacgcacagcacgaagaacggcttgaccttccgcggatcgcgagcgccgcgcaggcccagggcgcccacgaccaggtcgacgacgccgctgccgaccagcacgacgcccagcaccaggcccacggcgatgccggccaccagatccgggtcgttcgggtccatcgcgttcacggcgtcggtgcccaggccggcggcgatcagcgccaggaacgcgaggcccagcacgatggagatgacggcgaacaccaccagcacgatggagatgacgcgcagcgccttctggctgcccgagcgctcgacttcggccttggcctcaccaacgatgcctcggtcatgctccttcttcaccacgtcggcgagggtggtgcacaccagcaggtagacgacgtcgccgataagcaggaaggggtcgtccaggaatgtgccgcccaagaaccagttgtacacgatcatcgccaggatgacgatggagatgccccagctgagcgcgcgataggggccgaccttgctcgcatcgttggaagcgcgcaggccaaggaaggcaacgatcagctgcagggcgcccatgatcaggaccaaaatgcccacggccatggtaaggatgcccgccgtcgtctcggtgccctggaagttcactgcgtcgttcaggccgagcgagtcggccgccgcgccggaggctatgatgatcgcgcccgaaagcgcaaccaaaactccgaagatgatcatgatgatagaggtgatgcgcagagctttctgcgtaccggtgcgagggggatgcgccatagtacgtcctttctcgaaaacggatcttttaagtcgaagtataggagcgctgcgtccgataggcgcgcgaaagagcccgacaacggaaaggacggcacgagcgcggcatatcccgaaacgaacgccgacgagcccgcgcagatccctagtccccgccgacggcggacaaaggcatggcgaccccgctcgcaagcactggcgacccgccgggaaccgtcgcagcagcaacagcccttttcgctgccgccgcgctcgcaactgcggcggccatcgcgcgacggacgcgtacgggacgcgacgatcagcgtctgaagcgaaagtccgcttactcgcgaaacagcgtgtaatccagatccgacttgttgcactgccacacagtggcgttgctgaagccgaagcgctcatggtcgttcgtaaacgcggtgccgtagagactaacggcaattttcatcccgcagtaagggcagatgccgccgggcaccgctttcggaagagcggccacggccctgtcggacagagcctcgccgccggacacctcttcaagatcgtccaagccaagctgctggaatttatcggaatcgttcatgttcgatccgcctttctgtcagccctttaagcgaacagacccccacccctacatggtctggcgctccaccagttcggcgaatacgccgcccaacgcgcacagctcctcgtaggtgccgtcctccaccacgcggccgccgtccagcacgatgatgcggtcgcatgcgcgaatggtggacagccggtgcgccacgatgatgcgcgtgcacttcatccggtcgagcgcctcgctcacctgtcgttgcgtcacgttgtccagcgcgctggtggcctcgtcgaagaacagtaccttgggtttgggggcaacggcgcgcgcgatgaggatgcgctggcgctggccgcccgagattccgcccgcgccctcggacaccatcgtattcatgcccatgggcatggcgcgaatgtcgtcggcgatccccgccagctcggccgcctcccacgcatcctccatcgtgagccacggcgcagccaccacgatgttggagaagatgtcgccggtgaacagctttccgtcttgcagcaccgtgccgatgttgcggcgcaaactggccacgtccagcgtctcgatgtcgcgcccgtcgtacagcacggcgcctttctgcggcttttcgaatcccagcagaagcctcatgagcgtcgatttcccgcagccggtcttgcccaccacgcccacggactggccggggcggatcttcagcgacagatcatccagcacggcaggcgcgccttcggcgtagcggaaagtgacgttgtccatctcgatgcgaccggaacaatgctcaagcacctgcttgcccccggcggactccggcaccgatttcatgatgggcgcggccatatcgaggtgcggcttgatggacgcgaagttgccggcgacgccggccagcgacatgaacgcgcccgtggccatgccgtacgccagattgaacgccatgtactccgatgtcgacacaccggtctgcacggcggtgaagtagatgacgatggtgcccaccaccgagaccgccgtctgcacgacgttcgagtagcgcatgaggcgcgggccgttgtacgtcagcttgacctcgtctttgtacgaatcgacccaggtggcgtacgcgcgacgctccgcaccggtcagcctgatcttctggatgccggtgaacaaggcgtattcccatcccttgcggcgcgcggagtgctccagcttgcgcttggtcacgctcacctgcaccagcacggacgccaccgacactgccgcgctggccaggatcacgcccagcgcaggcaaggccaaaccgggtgcgtacgcagctatctgcgccacgtacgccagagagaacaccgaggtcaaacccgtggtcaggacgatgttctgcagcatgctcgccagcgtctcgatactcgagaggcgtgcggacagatcgcccgatgcgtacgcgcggtagaacggcgccggcagggaaagcgtacgcatcatggcagcggcttgcaccgacaggctcagcttcgtgccaacgcgcgacatgaccagttctttcgcgccgccgatgagcacccgggcgcacgtgaccgacgccaacagcacggcgatgggcaccaccacgcccacgttgccgctatccaccaccggtccgaaaatcagactgttcaccgcaggcagaagcatgcccagcaacgtcacggccaacgtcgccgccacgatcatcacgtaatccgaaaggtccaggctgcgcaccatgtgcagcagcacgtccctcacgcccagctctcgctgcggcaggggctggtagaagcagtacgcttcctgcgcgagccgcgccgcattcgcgcgatcgacgcgtaccttctcgccggtggcggcgtcgctgtacgcgaagccccccgctggctgagggatcagcgctaccggcgcgccgtcgacgaaccccagcatagcccccgccgcgtcgcgctgccagcctttcgacaacacgacgcgccggcacatcacgcctgttccccgcagctgggcgtctatgaggtcgcgcacgctcttcgggtcgcgcggggcatcggccggcttcacgcggtagtacgccagcacctcgcccacggcatcggccgcggctttgcccgcatccacttccgcgccgcccgccgcccgcccggtgatggccacggaaaggtcccaggccgcctgagagaccaggtcctcgtcatgctccagccgttccttgatctgactgtcgaaccaacccatgcgcacctcctcctattcctgggtcaccagctgcagatacatgcccccgcgctcgcacagctcttcgtgagtgccgcgctccaccacgcggcccttgtccaataccacgatctcgtcgcagtctcgcacggtggacagacgatgcgccaccacaatgcaggtgatgccgcgcttgcgcaccgcgctcatgacctcctgctcggtcttggcgtcgagcgcgctagtcgcctcgtccataatgagcacggtgggatcctgcgccagcacgcgagcgatttccaagcgctgcctctgtccgccggacaggtcgcgcccgccttcggacaacacggcgttatagccgccgtcgcgctgcatgataacctcgtggatgccggcatcgcgcgcggcaaggatcacctcgtagtcctcgatggaggtgtcccacaggcggatgttgttggcgatggtgtcgttgaacagcacgatgtcctggtcgaccacggccaccgacccggtcagcacctcgcgcggcacctcgtccatgggcgagccatcgaagctcaccgtacccgaccaagggcgaaacaagccgctgaccagcttggcaagcgtggacttgccgcaccccgaagggcctacgaaggccacgctgcgtccggattccacatcaaggtcgaaatccttgatcaggggttcttccaacctcgagtatccgaaggtcacgccctccatatgcacggcgcccttgagcttctcgcacgatgcggcgcggtcgagcggagcctgggagaacgccggatcgtccggatagcgcatgacgtcctcgatgcgctccatatcggtgcgcatctcctgcagcgtctgcatgacggacgtcaacgtggaagcgggagccatgaactgcgacaggtagccttggaacgccaggatcatgcccacggtgaactggccttgcagcaccaagtacacgcccgtcatgagcacggcggtgttggtcacctgcatgaccagctggggcaccagccccagtcgctgccccaagcgcgcgaagcggacctgttgcgtgttgaaacctgcctggaagccggcccagcgctcgaaatagccgccctccgcgccggcggccttgatggtctccaccatttcgatgccggaaaccgtggcggcggccagcttgcccgcatcgcgcatctgcacgcgcgtcacattcacgcgcttcgccgagatcaagcgcgccatgcccaggtttatcaccaccgacgctatgccgatggcggccaacagcgggctgtaggcaaccatcaccacggcgtacagcaccagcagaacgaagttcagcagcagcggcgccaactgcttcaccagcgatgcggcgatggtggtgttggtggccgcacgagccgataggtcgccggtcatgcgctgcgagaagaactccatgggcaggtgcagaaccttccacatgaacgacgagttggacactaccgccatcttgccctcgagacgtagcaggtacatggcgttcagcacctcgaccacgatgcgcaccgctcccacggctatcagcaaggcaatgaaggggtacagccattccgggttcttcccgcccagcagccggtccatgaacacttgggagagcgccggattgatgatgccgacgacggccgtcaccgccgccgtgatggccacgaacgcgagcgcggcgcgcgagctctgtaggcgcgggccaacgaactcccataccgaccggggcttgccgctgggctggaagtcgggacccggcacgaagcgcagcatgacgccggtgaaggcggcatcgaactcctcctccgtcacggtcacctcgccgcgtgccggatcgttcagatgcaccttgcctcccttgaaaccgcggcacaccacgaagtggctgaagttccagtggacgatgcaagggaacacgccctgcgagcgcagcgcctcgggctgcatacggaaacccgaggcctcgaatccgtaggcgcgagccgcgcgcaccacattggaagccttggatccgtcgcgtgatacgccgcagtccgcgcgcacctgctcgagcggcacccatttaccgtaataagccgctatcatggccaggcaggccgccccgcattcgagcgcttccatctgcatgataacgggaaccttgcccgccatctggccaggcttgcctgcagtgcgagcgcggcgcgctcccttacccggcagcatcacgatgcgccccccagaatcaggctgatgggagcgaactcgcttgtggccacatgggcatcgtacacgccgtcgggcaggtctatggtcacgtcgacgggaaacatccaactcgttgcgttcaccttgtgcgctgcgtactcgtccagctgcgcgaccagtgcgtcgggagagaggggcgtggttcccacggacgctacggcgcctttggcgctgtcggcgctcaccgtgtcgccgacggccacctgacctacctcgtcctcggcgacgtagcaggtcgcgtggccgccttgcaccaccaacgcagtaggcatcgtgtcgaccaagcgcccgcagcacgcccatatgaagccggccagcaacaacagaagcacggcgcccagcaccatccacaccccgggattcgacacgcggatgtagtcgtcgagctgctcgggcgactttgcccgatccaggctttcctggcgaaagggcgaagccgccttgtcttttccgtcgcgtgcgctcatcgtgaacctcccgtttcggtcaaaccgtcgaagccgggcagaacgatgggaagctcgactccttcgcaaccggccgcaacttcatccagttcgtcaagcgccagctcgccttcgcccagcgccccccaggcgctctgcgccgctgcgtcgttcacccacaggccttcctgctctataaggctcttgaagtcgtcaaacgacatgccccccgccgcatggcgggcggcatccatcgcagcctcgtcacggtcggaacgagggctcttcgcatcgggttcgaccatcgtcgctccttgctcgcgcggtcaaaagaaacggttcccctttttcgggcatcgctgcgtatcgtgaacggatgaagcgcgggcgacgctctttttcgtcaaccgacaacgatggggtacgaacacgcgactgacaacgccccacgaacgaacgaccactttcaacgaacgaacgaccaaggacggttgctcgttcgagagaagcgcttaaaaccgcgcattttcatcggatcaataccgaccatctcctcaacgcccagctcacgcgcctgcgccgcccgtcgccgcttacgggtttcgcaagcggcgacgggcggcggttcttcaagaacccccgcccaagctaatgcagccgcagtcgcgtccgcgcctagccgacctcccccataaagcggcagatggaagtgatctcgcagatctcgccggtatccctccgaattcccgttcccgtggtcgggcattcgcacaccgccccgcggtcgtcaaccaagcccaaaccggtgtactggcagcagcaggcttcgcctccggcgacggcgcccagctcgtcttcatcgagttccgccgatgaaggggcgaagtcctcggccgacaagtcgaagccggctttctgcgcgattgcagccgcctgttctgcattctcttccgcagacaggccttcaagcgctttcagctcgtctttgatcgactcgtcctcgctcgccttcttcagaaagtctttcaattgctcgttcatgcgcaatcctctccgtttcttcggtttgctggttttacagcgttaccacgcaatagtaattcggccaatcgaactgaccgtacttgcaggtggcgcaacacttcgtctccgatgcctggaagtcgcacacgtcagacggggacacgacatgataggccccgccgacggtcgcatccagctgttgctcggtgagctcgccttccgcggttctcaccgccatgaaggctgcctctttttcgggactcaactcaaggccgagctcggcgctgacctcgcgaagctcctcaatcgtctggatgcgcgcggcgcgctccatcatctcttgctcggtagccgccatagcagctcccccttcctgttccgtccgtccttcttgagcgatgcctgccgataagtgtaggaatcgccggccttcgcacgcaaggcgtcacgaacgaacgacctattcaaccgcacgaaaagcctgttgcgcagtgcgcagcggtaggcaaagggaacgctcgtttcgtttgaaggggcgttcgtttcgacctcgtttggcatcgacgagccgtctgcggctttcttctatactgcggggaaggcgctcgtcgccttcatccttttctgcattttgaaaggttgccagtgaagaaggccgtgttgcatacttcgttctcgcgccgttcggcgcatgtctccaggagaacataccgtgactagcgagagcagcaggcatgttcggggcgaggctcccgtggacgatcctgcttctcatcccctgatggacgagacgatttcgctgacgcgtgagttcgtccatcggtactggaacggcgggacaagctggtgcgccgcccgcctttccgatgatttcgcatggatgggggcacaggacgaccagtccgacttatcaagcgattcgtttcgccgccagatggagcagatcgcaatcgaacgaccccgcgtggttcttatgtgcgagcagtacctgcccgttgccgcccaggagaccctgtgcatcgtggcagggagctacctggttttcggcgacccggcatccggccgacttgccgcacaggagcagcgcttcacattcgtgtggaagcgcgacgaaaacgacgactccctgaaaatctgctattgccatgtatcgcatccgctgcctcctgcaccagatagcgagccgctttccgtgagcgtgagcaagcaggcatacctgtacctcaaagccgtcctgatgcgccaacgccaagacgaggccgttaccgtgcgcgacgtagacggcacttcatggcgcatcaatcccgatgagatcgtgtgcgtggaggcgcgaaaggagcgcactgtgcttcattgcgagaagacggacgtaacggtgcacggctgtatgggaaacgtgctggagcaacttggattggacatgatgtacgtgcatcgtagcttcgctatcagcccgcgccatgtcgcgagcctggagaaacgcgatctggtgatggacaacgggcttgtcatcgagattcccaccaaacgcctatcccaggtgaagaaagagctattcggctagcaacaagggttttcgttgcgcgcgagcggtctttcgttcgcaaggagttgcggacgggcgccgtcgcttcgtatgctaggcgtcgcaagctgctttcaagcaggcggttcgaaaagagaaagaaggcccgccatggcaactggcaaagaaaccagcacagcggcagaagaagctgcagaaaagctcgccgatcaggaattggatgcaaccggaggagggccagggatccctcttgaccgcataataaaccccaatcgctaccatttcggatgcggattatgggttcccaaccccggacacgagtatgacgaaaggcactattgcattcattgccgcttcttcttggacaccggcccgcactctttcgattgcgtaagaacatcgtccccttgggattggggcggctaggggaggggatcttccgttcgcggaattcagcatctaagcttggaaaagacgactgaaaattgttcagaaccctccatctccgccaagcactgcgatgtggcggcagggctcacatgcaacgcgctgctgaatacggcggggaaatgcgaagggctgagccgacagagagaatcgctcgcttcgaccccgcccttcgccaagaacgctttcacctgcttgttcgcgcgccttcctttcgccatcttccagcaagaccacacggggaaggcctagccaacgtcgcccatcgagtggcagactctatcaacgttgacgaacccgcttccgtcggtccaggctcctgtcccctctcttgggcaatcgcacagcacagggcgatcatccatcaggcccgtaccggtttgcctacagcaacaggcgtaacttcctcctgccacgacgttgagctcgtcgtcgtcaagctccgtttcgacaggagcgaagtcctcgaccaacacatcgaagccggcttcccgggcgatggctgccgcgcgctcggcacgctcctcttcgggcaggccggcgagggcgccgagttcctctttgagcggcccgtcctcgctcgccttcttcaaaaagcctttcaattgctcgttcatgcgcgctcctctctattgaaggtttccgttggactgcaaaggcatgacttcggcaggcttcggcccgccttcgtttttatctaaaaagcagtagagatttgggtacgaaaaacggctatacgcgcaggaggcgcagcaaagcgtgttatcttgttggtaattgcacttgaagagtggggacacgattacggagccgccggacacggcagcaagctcgctctcgtcgagctccgtttcggcggggtcgagatcctcgaccgtcacctcgaaaccggcctcgcacgcgatggcggccattctcgccgcgacttcgtcttctggcagaccagcgagggcctccagcttgacccgcaggccttcgtcttcgctgaccttctccatgaattccttcatgccctgcttcattcgttctcctttctctcggcgatcctcgtctgagccctctccacggtctcccgaatacgggccgcgtagccgcctttcaggatgaggcactgggcgcgatcgggcgacagtatgtcgtcgggggcggtgaacagcgcgctcgcgcggcacccgccagcgcatgcgccgcggtgctcgcactgggcgcactcggggttgtgctcccacagcgcgctcacgcgcgtatcgatgagcgagaggtactccgagtcggacaaaccctgcctcaagccgatctcggtggccagcgggtacctttcctgcatcggcatggacgacagcgccatgcacggcagcatccgcgcctccggggacaggtagagcgtctggcgcgcgtggccgcacgtcacctgcgacgcgcacgcggcggggtcgcgctcctccggatgcttccctatgttgggaatggtccaatccccgctgcccggacgcgccatgaagaagccgcccagatgcaggcccagaggcgcgccgtcctcgtagaagcaggggatgtagtccaggtagacctcgaaggtctcctccaaggtgagcgacctgtcctcgcccaggcgctcccacgtgtcggtgtccgccacgggattgaccttcaggctctcgcaatggtgcgccgccagcgtgctgacgctctctcgcagcaggtgcttgttgccctggtgcaggcacatctcggctccggtgggaaaaccccgctcgtggcagaggtcgaacgccgccagcaccgcgtcgcctgcgccggggacgccgcgcatccagtcgtgccagccctgcgtgccgtcgtagctcatgttgaactcgggacgaatcccgcgctcctccagctggtcgagcagcttctcgtccaccagcttgccgttcgtgtagatctgcgcgatccgtatgcggtaggacaaaagcgcgtccaccagctccatgaaatcgcggcgcaccagcggctcgccgccggtcagcgacacctccaggatgccgcagtcggcgatctgccgcgccaggtccatcatggtgtcgtggtcgatctcgcccagcttcgcgtcgggcgcggacatgtagcagtggcggcaccggtagttgcacttgccggtgatcgaccagtgcgcggttcggacgaagcggttctgatagcggcggtactcctgatcgggcgtgaggcgctctcccggctcgcacggacgcacggcaccctgttcctccagcttctccacgatggcgcgcacctcgtcgctgatgatgggtagcgacaggtctatctgcccatcgcacagcgaaagcgcctcgaacgtgcgcgcgtcgacgaagcgcacgccgttgtgcggccgctcgaccacggcatagggcagcttctcccagccccgcagaactagatcttctctcaaaagtcgcttcatgtcgctcttttcttcctttacatgcggacgccgcctcggcgaccctctccctccctgcttacgatgaggcgtttttcggcttgaaccggcaggtaaataacggatagagcatctgcttgttgcggcacgtggcgcatatgcgattatcgaaatcccagccatcccattggtcgcaggtgtcgaacaggtttatatacggcgatccggggccgaaaaaacccgatccgccgaccgaggcgtccagttccccctccgacagttcccgcaactctgcctttgcagccatgaaagcttgctcgtcttcgggagacatctccacgccgaactcagcgcatgcctcgcgcaactcctcaatcgtctggatacgcgcggcgcgttccatcatctcctgctcggttgccgccatgatgattacccctttctcgtccgaccgcgcgtcgcgaccggtgtctgcggatcagtatgagaaccgcttctgccgtctgcaagccgccgcgaacgaacgaccgattacggcgaacgaacgctcgtgcatggagccgaacgaagcaggacagatgggcgtgagggggcgttcatttcgctcaaagaaaaacgtgccgatgcctcgatcgcagtcgcgcgtatcgctcaatgccgcggcgcggacggcgaaatcgtcgaaggatcgcatggcgctgcaatggtggcaagctttgcaactaccgcgacaatgaacaccgatcaaggcatttcgtcgtttcgcccggattttgcccagatttgtgtcgaaaatggatctgaacgcaaaaaaggtcgaaagcgttttcagcttccgacctgcaagttcatggtcgcgggggcaggatttgaacctacggcctccgggttatgagcccggcgagctaccagactgctccaccccgcatcattatgttgcgcctacctctcctgcccgaagtgccttcaaacaggaaaagcggcaagaaagaatactacccgtctgccttaacgaatgcaaatcatttctcagtgattcacaaggtctacacgtttccatgcagttgagcgaacaggaaccgcgacgcacaaacgacagcgggcccgcgcgattgcgcgggcccgcatggcagaaccgggtttcggcgaggacgttagtcttcctcgggcaccgtctcgctgacggaggcgttcgtgatcaggatcaacgacgccacggaggcggcggcctgaagcgccgtgaccgtaaccttcgccgggtcggcgatgccacggccgatcatgtcgccgtactcgccggtcatacaatccagaccctggcccagcggcagctccttgaccttctcaacggccacgtcgccgcgatagcccgcattctccgccagagcgcgcagcggcacctccagcgccttgcgcagaatgtcgatacccagctgctcctcggcgttctcgcatacgaggccgtccagcgcggacgcggcctgcagcagcgccacgccgccaccggccaccaggccctgctctgcggccgagcgggtagccagcaaagcatcctggatacggctgcggatctcgttcatctcggactccgtggcggcgcccacttccatgaccgcgataccgctggacagcttggccagacgctcgcgcagaacgtcgcggtcgtagtcgatcttctccgtttcgatctgcgcgcgcagctgatcgcaacgctgctcgatagcctcgggcttgcccttgccgcccaagatggtggtacggtccttggtgatctgcacgctggcggcgcggccgagcatgctcttgcgcgcatcggccagcgtcaggccgcgatcaggcgtgataacttcgccgccggtgaggatggccagatcctcgagctcagccttgcgtcgatcgcccagagccggcgccttcaccgcaacgctggtcagcgtgccgcgacggcggttcatcagcaacgtgttcagcgcctcgccacgcacgtcttcagcggcgatcagcaacggatgaccggactgcatgacctcttccagcacgggcacgatgtctgcgaagttgtcgcccagacgctggtcggtcaacaggatgtagggctcggtgagctcgccttccaggcgcgccgggtcgtcggccatgtacggggagatgaagccgttatcgaacatcatgcccttgaggatcttcacctcgatgccgaagttctgagacttctcgaccgagatgacgccgtcacggccgatggcatccatagcctccgcgatcttctcgccgatctggcggtcgcctgcggaaaccgtcgcgatctcggcgatctgctcacgcgtggtaacctcgacggcgttcttgagaacctcgtcggccaccacgtcggcagcgcgctggatgccgcggcgcagcgccagcggatcggaaccggagatgacgcagcgtactccctcgctcacgatagcgtcggaaaggatggtcgccgtcgtggtgccgtcgcccgcgtcgttgttcgcggcgatggcggcctcgcgcacgatcttcatgcccatgttctcgatgggatcttcaagatcgacattggcggccaccgtggcgccgtcgttggaaacgttgggcttctcgtgctccttctgcatggcgacgtagcgccccttcgggccgatcgtcaccctcacggcgtcggccagcttgttgacgccggcagccatcttcgtacgggtttcgttgtcgaacgcaatgtctttggacatagtctggttcccttctcatcggtgtgcggcgcttcgccatcaccgcgcgcacgataggcgcctctgccgctcggctgaaaaaccactgacccgagcatgcggaagctcataaaaatcactgtcgaaaaagttagcactcttttgcttcgagtgctagtcataacaagctttttcctcgtgacgaatggaaagcagcgctgttttgaagggcttcgaacctcttgccaatcggaaggctcagcaccgaagcctcgaaagcggcacccagaaacatgcttctgcctaatgcgccgcgaacgccgatgctctacaatcaggagctgcgcgatgctggccgagcgttcaactcgaagccgtttcgcaccgcgccgccgaaacagcacgacgcgaaggagcgcctccatggcagtgatcgatgcccatgctcacatatatcccaacaagatcgcctcgcgagcggtcgacgccgtgggcgacttctacctcatcgacatgttcggcgaaggcacggtggagcacctgctgtccgcgcagcagcatgcgcccatcacgcacttcatcgtgcattcggtggccacgacgccgggcagcgtggagtccatcaacaacttcatcgccgagcagtgccggcagcatcccgagttcatcgggttcatggctatgcaccaggactatcccgagcccgagaaggaaatcgaacgcgccatcggcctgggactcaagggcatgaagctgcatcccgacacgcagcacgtgaacatggacgacccgcgactcatgaacgtgtacgagatgatagaggggcgcctgcccatcgtcatccacacgggcgactaccgttacgactactcgcatccgcgccgcctgatgaacgtgctgaaaacgttccccgacctcgtggtggacgcggcgcacttcggttgctggtcgcgctatgaagtgggctacgacatcctgcataacgccgacaacctgttcgtggacgcgtcgagctcccagttcttcctggggcagcgccgcacggtggagctggcgcgcatgtggggcaccgaccgcatcatgttcggctcggactaccccatgtggagccctgcggcggaatacgaccagttcgtcaccgccggcttctcggaggacgagctggagaacatgctgtggcacaacgccgagcgtttcgccggcgtgaaggtgggatagcgcacgcaacaagaagccccgccattgctgacggggcctgaagtcgtttagctttcgtcgctttccggagcgtgctcgagcaccacccgaatcttgtcgatgcggtggcggtccatgtcgactacggtgaacgtggccctgtcgtcgccgtcctcgatggtcacggaatcgccctcgtcggggatacggtcgaacacggtgagcagcaggccgcccgccgtctcgcattcctcggactcgagaggctcgaaaccgatgagctcgcccacctcgtcgatgggaagcgagccgtcgatgaggtagctgccatcgtccaactgcacgatctcgtccgagccgccatgcgcgtactcgtcgtcgatgcggccgacgatctgctccatgatgtcgctcatcgtaacgatgccggccgtgccgccatgctcgtcgatgaccacggcgattttcgtgcgcttctcctgcagcgtttgcagcaacttcgcgatgggcacgccttcgggtacggcctggatcatgcgcacgcgcaggtcgtcgaccgtcgcgtccttgggcatcgtgtagaggtccttcacgtgcacgaagccgacgatgcggtccttgctgccgcggcacaccgggtagcgcgtgtacttgtactgcaacacggtctggagactctcctccagcggatcgtcgaggtcgatgcacaccacatcggtgcgcggcgtcatgatggcctcggcgtctttgtcgcccaggtcgaagatgttgtccacgtattcgttctgctcggggtcgatgagtccgctttcggtgctctcgtcgatgagcagcttgatctcctcgtcggtgtacacctcgtgttcgttggccacgtcgtggcccagcatcttcatgacgccgttcgtaatgctgttgaacaaccacatgacggggtacgtgatgcggtagaaccacacgagcggcgtggccgtgaacagggcgtagcgctcggtggagaagatggccagcgacttcgggatgagctcgcccaccacgatgtgcaacgcggtgatgatgacgaaaccgatgacgatggagatgccgtgcgtggccgcctcgggcacgttgagtgccttgaacagcggttcgaacagggctgacaccgcaggctcgcccaaccagccgagggcgagcgaggcaagggtgatgcccagctggcaggctgacaggtaggcgttgacgttgtcggcgacgagcttggtgtacttggcgcccttgcgaccctcgtccacgaggatttcgacttgcgacttgcgtacgcgcacgagcgagaactcggcggcgacgaagaacgcattcatgagcaggaaaaacagaacgagcagcaaactgagtgctatgggcataattgcggatggtcctcctttatatgactattcgccatgtaatcgtacggcatccgtccatctggtcatacacccgttaccggaaacccgcaggtttccacaagtggggttgaagccatccgcctatggaggagcgacccaggaatccagaagcctcgcaaagacgcatcatcgccccaaaaacacgctccagcgactgaggcgtgtttttggggcgatgatgcgatcggaaactcaggaacatccgcggccgcacgcgcccaggcaaccgcggggcgtcacgccgtcgccaggtcgccgtcctcgtcgacgctcggcgccgcctcggcggtcgaacgttcggacatcgccgtcgcgccctcgatgccggcgtccttcggcagcacgaggttcgccaccacggccaccaggaacaccacggccacgcagttctgcgcgaacacgctttggatcagctcggggaagttcgcgaacagggccgacacctgcgtgaagcctatgcccacggccagcgacagcgccgcgatgaggatgttgcgctgcgagaagcccgcccgcgcgatcatctggaagccgctgacgatgatgttgccgaacatcatgatggtgcagccgcccagcaccgcctcaggcagcgacgcgaagatcacgctgatcaccggcaggaacgccgccaggatcatgatgaccgcgcccgtggcgatggctttgcggttcaccaccttcgtcatggccacgagacccacgttctgcgagaacgacgtgataggcaggcagccgaagcacgccgacagcgagctgacgaaaccgtcgcaggcgatggagcccgaaagctccttctccttcacctctcggttgaggcccaccatggtcagcgcggaggtgtcgccgatagtctcggtggccgacacgaggaagatcagcgtcaccgacacgatagcgcccaggttgaactcgggcgtgaacggcatgagctgcggcagtgcgaacagctccatgctctggaagccgctgaagtcgaccgcccccgcaaccacggcgcatgcatacccgatgaccaggccgaacagcaccgaaagctgcttggtcttgcctttcgccagcacctggaacaccaggcacgaaaccagcgagatggtgcccagcagcaggttctgcggcgatccgaagtcggcagcgccggagccgccgccgaacgaagaggcacccacgcccaaaagcgagaagccgatggacgtgaccacgacggccgccacgatgggcgatatgatgcgccgccaatacttcgcgaacagacccagcacgccttcgatgatgccgcccacgatgatggcgccgatggcgacgttgtacccgtacgtggccgcgatgcccacgagcacggtgacgaacgtgaagctgatgcccataacgatgggcaggcccgaccccacgcgccacagcgggaacagctggatgagcgtgccgatgcccgcgatgagcatggcgctttgcaccagcatgcccagctgatcgtccgcgaggccggccgccgcgcccacgatgaggatgggcgcgaggttcgccacgaacatcgcgaggatgtgctggatgccgtagggaatggcgcggacgacggggatgtcgccgtcgagcttgaacaggttctcgtgtacgaatgctttcatcggaacgcgatctcccccgtctcggggtccatgcgctccacgatggcgagcgattccaggcggtagccgcgttcgcgcaggtcgtcgccgccaggctggaagcccttctcgatggcgatgccgatgccctccaccgtggcgcccgcctcgccgacgagctcgatgaggccgttcagcgcgcatccgttcgccaggaagtcgtcgatgatcagcacatggtcgtcggcgttcaggaacttcttcgacacgatgacgtcgtacacgcgaccgtgcgtgaacgactcgatgcgtgtcgtgaacatctcgccgtccaggttgatgctctgagccttctttgcgaacaccaccggcacgccgaaatggcgcgccaccacgcaggcgatgccgatgccggacgcctcgatcgtgaggatcttcgtgatgggagcgtcggcgaacagccgcttgaactcctcgcccatcgcgtcgaacagatcgatgtccagctggtggttgaggaagctgtccaccttgaggacgccctccgacttcaccaccccgtcgcgcctgatgcgttcctccaaaagctccacgtgccgcctccgtcgtcgttccgtcttcatgcgtcgcgtcatctcgcagacgcaacgaacctttgcaggacagtgtaaaggacgcatgccgccaggggaacggggaattcgctagatcgacgggttgcccgcatggaaaccacgtgggaaatgatgacaaggaatgtggaatccgcgtgggaacggcgctggaaacgcgcaagatcgagcagactttccatggtgttgcacgccatggaaacgtagaacgggcccgctatacttgtaggtacggattcgatccggcggcttggtgcctctccctctcattactctagaaggatggaggtgaagaccatgaccgctttggatttgcttgcgttggccgaattgctgttgaagctgatgtctcgtatcatcgagtttgccctggtgatagaagacgcgctccagtcccacaagggaaaggagcgctccaagtaaacccaaaccgccgaagcgatccgagagccgtggggagcaccaactccctgcggctcgcctcatattatacgcatcgaacggcagctcgcaagggtttccaagcgatgcagctcgcgtccctacagcaccacttggccggtgaacagcagcacgagcgacgtgacggcggcgatgaggatgatggccaccaccaccttgtccaccgtgctcttgaggtacggctcgttgcgctccttcttgcccttgatgtacatgaggatgcccggcgcgtacagaagcgacatgagggtgagccccgtcgcgcccgacgcccacgccaggaagaagctgtacaccacgccgaacacgccgaaaatgcgccacagcaccaggctgccgcccaccttgcccttgaacgcgtcgggctcggtgaacgtgagcttcgcgaagtacgccgccgacagcaggtacggcagcaggatcatgccggccgacagcgcgtagaagaactggtacgtgctgtccgagaacagcatgaccacgaggaacgcctcgatgatgacgttcgtcaccacgagcgtgacgatgggggcgcccttcttgttcgtcttggcgaaggccttgatgaacacgccctgctcagccgcctcgtaaggcgactcgctggacagcacggtgtagcccaacatggcgcccaccagcgacagcaccacgccgccgttgatgaggatggcgccccactgccccaccgcgtgctccatgacgcccgcaagcgccgggttctccagctgggccagctcggacagcggcatgacgcccatgctgagcacgctgaccatgaggtagatgctgagcacgcagatgaacgcgatgatggtggccttgcccacgtcgcgttccttcttggcgcgaccggagatcgcgaccgcgccctcgatgcccacgaacacccagatggtgatcatcatggtgttgctcacctggtcgaagaacggcaggcccggatcggcgccctgcgacatgttcgccagaaagatgccgaggtcgaatttctgcagaaagatgatggccgtgatggctacgaagataggcacgaacttcgagatggtgataacggcgttcacgccggtagcctctttgatgccgcgcgatacgaggaacacgtagaaccagatgagcaggctggcgccgatgaccgacggcaggttcgtgccgccgccgaagatggggaagaagtacgaaagcgcgccgaacagaagcgccgagaagctgaccgtgcacagaagcgcgctgatccagtagccccaagcgctgttgaagcccaaaaagtcgccgaaccccgcattcgcatagctgtagatgccgcccttcaactgcggcttgatgcgcgagagcgcgaagaacgtcatgacgaggcacagcaccccgattcccgagatgctccatgcagtgaggatagccgcgccgctggcgccgcctgcagcctggtcgcccgccaacgtgaacacgccgccgccgacgatgagcgtgatgaccgtggtgacgaggcgaaagatgcccagtcctccgtggggttggggaatgcccgaagtggcggacgcgtggtgcgatgcggattcgctcatgtaatcaccgtttccttgatggacaactggtagcatgatactccacaacattgcattccgtcacaccgttatgcaacattttgcatgcagagcggttgtcgtcccgagcggagcgcatggcacggagatggcaaggggcgggacgtcacgcaatgacgaggcgctccacgaggacgttttccaacgccgagcggttgaggtcgcaacccaggccgctggcatggccttcgcggttgagcgtcaccatgccgcgctcggccgtgtagggcggatcggtgatgtcgcaggagaagtaacgagccgtggctccgatgtcgccgggcgcacccaccgcgctcagcgtctcgaacgcggcatgcaggcgcctggacacgcccgtgtcgtacatgccgcccatccacacctcgatgccccgcttgcgcgccatttgcacgaaatcgagcgcaggctgcacgccgccgcattttcccagcttgagggcgtagcaccgcagctcgggctgcgccaacgcacgggacaggtcctcggggcgcacgatggactcgtcgaggcagatgggggtgcgcagcgtgcgctgcagacgcgcgaggcggctgaacaggtcggtcggccccacggggggcaggcgccgcggatccagcggctcctcgatccagacgacgttcaggccgtccaagccgcgcagctcctcggcttcacgctccgagaagctctggttggcgtcgagcgtgatcatcatgtcgggcaacgcggcgcgcacggcctgcgcgcatgcgagcgcggttcccggtttcaccttcagcttcacgcgcttgtagcctgcctcggcgcagcggcgcgcggccgcggccgtctcgaccgcggagcccagcccgatcgccgcgccggccggcacggatgccgaagcgcccgcggtcgcggcgttcgcagccccgccgatcagctgccatagcggcttgccgacgatcttgccgtacaggtcccacagcgcaggctcgagcgcgccgcatgccaacggaaacgccttcgcctcgggaacggcggcgaaggcggcgctcgcctcgctgggatgcaggaacgcctcgcgcagcacgatcggagccagaacgtcgtggaggatgcgcgcgtcctggtcgagcgtttccggcagataccaatccgtcggaaacgccacgcactcgcccagccccgtgcgaccggcatgatccgtcacttcgacgatgatcgactcgcgatgcgtcagagtgaccttggctgttttgaacggcgttttgaacggcagccggatgcggtgcagcgtgacgcgcgccacctcgatgcgctggtcgtagcgccgctcgagcgcgacgcggtcgattttcccgatgcccgtgcgcgggaactcgtcgagcacgcacacgtgcttcggcaggtacagcttcgacaggcgcggcgccaagctggtgcgaacgtacgacgccagctgacggttcgtcagggatgcgagctgatccgcctgcgtctgcgcttgcgtccgctgcgcgtagcggctcgccctcggacgcggcgcgggcgctttctcgcgctcgacgaacgcaacaggccgtcttccccagcgggcgtcgggcgcgccgaacacgtgggcgtcggataccccggccacgcgcagcagcttctccttgatctcggccgggtacacgttctcgccgcccgacacgaacatgtcctcggtgcgctccttcacgaacagcttgccgccgtacagcgccgccgtgtcccccgtcaggaagaagccgtccaccgtgtacgcggcgcgcgcgttcaggtagccgccgaacaggcccgggcccttcacggccaggcggccgaacccgtcgtcgccgggatccacgatatgcgcctcgtagccgggcagcaggcgcaagccgccggtgaacgaagccgtcacctgggcgtgggcgatttggctggacgtctcggtcatgccgtagcttgcgtacacgcgcgcgcccgcacggcacgcgcgatcgagcgtctgcgggttgagcgcgccgccgcccagcaggatgcaggagtagcgcgcgagcgtttccggcttgtccgcggccaccatgtcctgcagcatcttatcgaccaccgacacgtgcgtcgcgcccttcttcgccgcgtcggacagcagacggacggcgtcgaagcggcggtacagcacgaacgggctgccgttcagcacgctgcgcacgacgacctggaaaccgccgatatggtagagcggcagcaccgcctgccacatgccctcgccgcgacgattgagcgtccggttggacgcttcggatgcgaaacagatgtttccccacgtcagcgatacggccttcgcacgccccgtggtgcccgacgtgaacatgaccacggcgcgggcgtcgaagtcgaacacgtgcgcggcgtgttcggcgaagtggatgacactctcggcagcatcctgctgcgccacttcgctgcgacggcgcagcgacgcgcggcccgagctggcgcggccgagcgccttcgtagtgcggggctcggcggacgccgcgttcacgcgggcggcgaagctagggcgcacgccgcgccccgtcgcacggacggcggacggtgcggccatctcgcccgtcaacatggccttcgcgccttccaacaggcgcgacacgttggtcgcatcgacgcgcaacgaagccagcgacacaccgggcttgcggtcgatgtccagcaaccgactgtacttctcggcatcggtcaggcggttgttgagcgcgaccaacgcgaagccgccatacgcggcagccagcatgaccagcacgtacgccggatcgttcggcagatccacggcgacgcaatcgcccggacgcacgccgcggtccagcaagagccgcgcgagcgcagcggacagcatgcgcgtctcgcgatacgagtacgccgtctcgttgcccgcttcgtcaacgtacgtgaagcacgtgcgctgcgggaactgtcgcaccgtgctctcgaacgcaccgatcatcgctgccggattcctgcctttcggttgccgcctgccagacgtgcgatcttacggaaacttggggaactgggtgaagtcgggagcgcgcttctccttgaacgcgtcgcgaccctccttcgcctcgtcggtggtgtagtacagaagcgtggcgtcgccggcgagctgctggatacccgcaagcccgtccgtcgccgcgttgaacgacgccttcatgaagcgcagcgccgtggggctgaactccagcatctcctgcgcccagctcacgcactccgcttccagatcctcgaagggaaccactttgttgaccaggcccatctcaagcgcctcggcagccgtgtactggcggcagagataccagatctcgcgcgccttcttctggcccacgatgttcgccagatagcccgcgccgtacccggcgtcgaagctgcccaccttcgggcccgtctggccgaacttggcagtctcggcggcgatggagaggtcgcacaagatgtgcagcacgtgcccgccgccgatggcatagccgttcaccatggcaatgacgggcttgggcaccacgcggataaggcgctgcaagtccagcacgttgaggcgcgggatgttgtcctcgcccacgtagccgccgttgccgcggatcttctggtctccgccggagcagaacgcctcgtcctcatggcggccgccgtggttgacgccggtcaggatgatgacgccgacggacgcgtcgtcgcgcgcctcgctgaacgcgtcgtacagctcggtgacggtgagcggggtgaacgcgttgcgtcgctcgggccgattgatgctgatcttggcgataccgcctgctgtttcgtagatgatctcgcggtacgccttgcccgcctgccacgcaatgtcgcccatggccgtcctttcgtcgcgcgccgtgagaagcggctgcgccgtgtgtagaaggggatctccgactagatgttccctatagtagcgcgtatcgcgcgttttcgcacctcaaagcaaaatttctccggaaagatcaggtacacttcgccaatggttgaagcgagcgctaccccgtgttctgcaggccggcggaaaccccggtcacggtggccaggatgagccccagatactcggtcttgacctcgtccgaaagctcttcctgtcggtttcggatcacgcgcaacgcgcgcacttgggcaagcgagagcgcgtccacgtaagggttgcgcacgcggatggcgcaaccaagcacgcggcggtgctgcagcggccactcgtctcccacgatggccagcgcccacgaacgcgtcagctgcatctcgtcgaacaccgcctgagccaggtcgtcgcggtcgcccagcgccaagtacatcttcgcaatacgcgcgtcggttttggcgatggacatctccacgttgtcgacgaacgtggcgaacagaggccattcgcgatacgcgcgctgcagaagctccaggtcacccacccgttcgcacgccgcgcccaggccgtaccacgcagccaggttgatgcgcgcctgcgaccacgagaacacccacgggatggtgcgcaggtcgtcaagcgattgggctcccaagccgcgcttggcaggacggctgccgatgggcagcaggcccacttcggccaaaggcgtgacggtggagaaccacggcgcgaagccgtcggtatgcagcagatccagatagcgctcgtaggcggcttcgttcaaacgcgcggccacatcggagaagcgtacggatgcctcggtgttgacgcgctcgaccgacggcgccgagttcatgagcgtggctgccgcgacgctttcgatatggcgcagcgccagcgagcggttgccgtaacgtgcgaagatgacctcgccctgctcggtcaccttgaatcggcagttcaccgaccccttcggctgcgcgagcaccgcgcggttcgccggcccgcccccgcggcccaccgcgccgccgcgaccgtgcatgagcacgacgtcgatgccgcgctcctcggcccagcgggcgatgcgctcctgcgcggaatgcagggcgagcgtggcggagacggggccggcgtccttcgaagagtccgagtagcccagcatgacctccatgcgccgccccgtctgcgccaggcggcgctgcacggccggcagctgcagcatcccgtccagcacggtgacgcagttctccaagtcctccagctgctcgaacaagggaatcacgtccagctcgggcacgtcctgcgcgtgcgagaatgcgagctctgccagctcgtagacgtcggccatgtgccgagcgctcttggtgaacgacacgatgtagcgccgggccatcttctgcccgtagcgcttctggatggcgccgatggcgcgaaacgtgtccagcacctcgcgcgtcatggggtcgagcttgcccagcacgccatgggcgcggatatcggccagcgcgcgttcgtgcacgagcgagtgctggcggaactccatttccaccatatggaacccgaacgtctcaacctgccatatcagcgtttgcacgggcccgtacgcggcgcgtgcggcaccggcgcgcgcgagcgagtcctgcaccgtgcgcaggtcggccagcagctcttcgggcgacaggtacatgatgtcggcgttgcgcgccacggtgccctcgaggcgtgcggccatcaccagcatgacagcgcggtgcggctcgaagcccaggtcgtcggccacccgtcccgtcagcgtctcgctcatctccacgagatggctccacaggttcataagctcttccgagggcgcggtgtaccgcgactccagcgtgaggttgcgcccgatgctgcggcattcttgggccagcttggccaccatatgcgcgaagtacttcgccgccacgcggcgcgacaccttcgcggtgacgttcgggttcccgtcgcggtccgacccgatccagctgcccggacggaagaacgccgggcacacgggcggcacgctgccggcgtcctcgcccagcacccagtcgtcgaaacgccggtacacctgcggcactgtatcgaacagcgtgttgtcgaagatgtcgatgatggtgtcggcctcttccaggggcgtgggcttcttgagctcggttggcgaggtgcgcacgagcgcgtcgatctcctgcagcatgtggcgctcgttctccaggagagccgatccgcccaggtagggatgctcgtccagcaacgcggcgatacggcggatcttgccctctaccgctttgcggcgcgcttcggtggggtgcgcggtgaacacggggtggaattccaagcgacccagcagctcggccgtgcgttcggggcccacctcgtccaatagatggccgtacgccaccaccagctcgttcgatgtgtccacggccgactccatcgacacgttgcgctccaactcgcgcagcgtttccacgcggtagttctcctcggacaggttcgccagatggaagaacgacgtgaacgcgcgcaccaccacttgcgcttggtcgaccggcaacgcgtcgatgagctcgacggcctcgcggaacgcccgcgcgccctcggtgtcggccgtggggatgccctgggcatcggtgggctcgtctgcggcgacggtgcccgggttgccctcgttcgccctgatcatgctgttgaacagacggtcgaagagagcgcagacggccggatcgtactccttgagcacctttcgctccatgcggagaaacaacacgaggttgtcgcgcaggctctcggggatctcgatctccgtgtaggattcgatagcctcggcggtgtccgacgcgcccagatgacggtcgagggaaagggctgttccgccttcgagatcggccatgatgcctcctgctcctggaaaatgagacaaagggacgggccaatgtctcatttcgcctcgttcgtttcttgccgcgtcattatactcgttcgggaacgaccagagacaggctgtaacgcaacctcgacaagaggcgaggagcgaaaccgtttcgcagccagcgcaactcgcgaatcggcccgaaactcttcttgcgaatagtggaccgttttgtataataagggcgagccgcagggagcgtgtactccccacggctctcggatcgcttcggcggtttgggtttacttgtggcgctcctttcccctacgggttaggagcgcgctccttatcaccagaaacagctcgatgacgcgggtagcgaactccaagagcaaaatcaccaacgaagcaatccccaaaacggtcatggtcatcacctccaatcatctagaatattgagagggagaggcaccaagccgccggatcgaatccgtgcttctcagtatagcgagcccgttctacgtttccatggcgcgcatcaccatggaaaaccttcccgatcttgcgcggttccaacgccgttcccacgcgcattccacgtttcttgcctccttttccaatacggattccgcgcgctttgccatcgtttctcacgcgaatcggaagcgggcgctcggcgctccggcttgcatcggcggcagcccaacgcgccgtccatccggctccttgcgtcatttcctcagaaacgacgctacttccttggcaaaggtggcgggggcttccaggtgggcgttatggcccgcgccgggaatgatgcggaccgtcgcacccgcttcggcagcttgagctgcgagggcgcggtacttctcgtcgcgctcgcccgccaggtagagcagcggcgtgtcgccggcgcgcaggacgtcgagcgtttcgagcgtttccgcacgcgagggcatgacgtgctggccggcttgctcgaacgtgcgcgcaagagcctcggcgtcgttcgccatgcgcccggcgcgcaggcgctcgcgcacgtccggcggcaggtcgcgctggctggcgaacaggggcagctgctcccagaaatccatgaaggcttccaggccgtcggcgcgcaggcgcgccgcgcaagccgcgtcgcgctcggtggcggcatcgcgctcggcctgcgtggcagggccgaagccggcggcttccaggacgaccgcggcgaacgcgcgcgggtcgcgacgcagcgcggccagcgtcacgcggccgcccatcgagtagccgagaacagcggggcgggcgccctcgcgatcggcgaccatgcgggcgaaggacagcagcgcctcgccctgcgcgtccagcgcgtaagcgcatgcgtcggccgggcgctcgctttcgccgtgtcccaccaggtcgagtgcgtatatcgggcggccggttgcggccagctttcgcgccacggcatcccacgacgccgagctctgcgcgaacccgtgcagcaagatgagcggggcggcggacgggcgggcggttgcaggcgggcaacagacattgagcgcatggtcggcgcaggacgagaaggtcgtggacgagaagccggcgcctggtgccggacaactcgcagacgccccgttcgccggcgtctgacacaacagatacaagaaggagattcccccgaacgagaaccggcgcgtctcggcagcgagcatcatcgggctcccacgaaacaagccatgccgacacggctcgcttgagcgtagggccgcggaatcaagcccttcggcgcggtcggccttccaaaatctggcacaaatttacgggtacggcacgcttcgtcccccagaatcgcccaaatgccgaatgcgcttcgacataatcccaggtcgcgaattctcgcagctgcaagcttctgccgtacccgtaaatttgtgccagatttcaccgggcggccggcggaaagcccgttcgagcaagcaccgccgaccgctccattcccgaattcgccacgtatccggatcatccgcctcgcctcccgacttcgccgctcgcggcttacgaccagtacggggcgtagcgttcggggaggccttcgaggggcacgcgcacctcgacgagcgagatgcccggcacgccaagcgcttcgtcgtaggccgcgtcgaactcggccacggtttccaccaggcggtgcggcacgccgaacgcctgggcggcggcgccgaactccacgtcctggggcgtgaggaacagccgctcgaagtacgcgtcttccgagcgttggggcagcatgtcgaagatgccgccgccgttgttgttcagcagcacgatgacgatgctgcgatccaggccgcccgacgcgcgctgcacgcgcagctcgcgctgcaacgccagcgcgttcaggtcgtgcagcagcgtcaagtcgcccgtgagcagggtcgtttgctcgaaatgctgcgcggcgcccagcgccgtggacacggttccgtcgatgccgttcagcccgcggttgcacaacaccgtcagccgcctgccgcccttcgcatagaacgtgtcgagggcgcgcacgctcatggagttcgccgcgaacaggcacgacccctccggggcgcgctcggccacgcggcgcacgaacgcgccttcgaacccggcttccaccgcatccaccgcatcgacgcgcacggcggcggcggcgttcgcctccaaccacgccgccgcgaaagcacgctgccggtcgtcagcggcatcttcgccgccgaggctctgctttgccgccagcatcgtttgcgagaaatcgagcggcgtgcagcgcaggtgcacgtcggtggcgcagttgaaatcgcgcgtctcgagcggatccaccacgatgttgatcgcgcccgcgttcgccaaaaacgcggtggcgcgcttcgacaccggataacggccgaagcggatgaccgcctcgggaaccagtgcatcgaatggagcgcctagcacggtgtcgtaccggtcgatgaccagcgggtcggcggcggtgcgcaagcccgaaagcggatcggccagcagcgggtactcgaacgactcggcccaggccaacagcgcacccatctcgtccgtcgtcgcgcacgacccctcgcccgccgccaccagcacccgacgaccgcgcagcagttcgagcacgcgagcggaatccatcggatcgaggtaagtcgacggatggatgaggcgcagatcggacggcgcattcaacgcgcttcggccggtttcgaacagcccttcgacccgcaggtcgggcttgagcggttcgtcgaacgggaagttgaagtgcacgggcccgcccaggcacgcgcctgcgatgcgcggtgcgccctcgccgtccgtcgcgcgcccggccgcctccccgcctgcggcgatgcacgcctcgcgcgcagcttggcgcgcgaacgcgatggcggccgcatcggcagcgggctcgggcatgttgcggaacgcgcgcacgtgcgagccgtacgcgttcaactggtcgcacgtttgcggcgcgcccaagccttgcagtcgcgccggacggtcgcccgtcagcacgacgagcggcacgcgtgacgactcggcctccaacacggccgggtagtagttcgccaccgcggtgccggatgtgcagatgacggccgccggttgcccactcgccttcgccagccccaatgcgaagaacgcggcgccgcgctcgtccacgtccacgaacaaccgaagacgatcggggaagcggcgcgacagctcgtaggccgtcatggccagcggcgtcgagcgcgacccggggctgaccaccacgtcgtgcacgccccatcgttccagctcgtcgaagaacgcgcccaggaacagggcgctggctgtaggatcggctctcatcgcgcacccccgtcactcgtatgtcgccggtcgttcgtaacgtcagcgagggtttccgcggtgcccaagctggggtcgatggcgggggcgtggcgcgcctcgcaggaagtccccgcaggggatactttggtacgcgagtcttcgtcagcggccacagatcgggtgctgcgggaagccgcagcgtcgactcgttccgtcggctgacaagccgacggaacctcttccccgtcgaacgccgacaggaccgtcttcagcttcatgccgatttcgtcgtactcgtcgtcggccacgctgccctcgacgatgccgcagccggcgtacacccagcccacctcgccgtcgaacacgccggtgcgcagcgccacggagaactcgccgtcgcccgcgccgtccacgtagccgcaagcgcccgcgaagaacccgcggttgtacgcttcgatgctcctgatcagcatctgcgcctcgcccaccggcgtgcccgccacggcgggcgtgggatgcagatcgtccttcatcgttcccaggtcgacgccttccaacatgcgcgcgcgggcgggcgtgcacaggtgctgcacgtgggtgagcggcaggatgcccggctgggcgggcacgtcgacgtcgtagcatgtgcggttgaacacctctcgaatgaaccgcaccacgtagtcgtgctcggcgcggttcttcgcgtcggccatcagctcatcggccaaccgcgcgcgctcttcctcggtggcgccggcgggacacgtgccggccaggcacatgctctccacctcgttgccgcgcttgcgtaccagcagctcgggcgtgcagccgcagaagaacacgtcggcgtagcggtacagcagcacggtgccgcgcgccgagccgtcgatgaggttcaccaacaggtccttcgacgagaacggctccagcgcctcgaggcgctggcggcgcgacagcaccaccttgctgatgcgcccccgcccgatggcgtcgagcgccgcttccacgttcgcgcgccacgcgtcacgcgagtcgggctccagcttgaacgggatggtacggcggttgcgacgcggcgcagcggcggcttggcgggcgaaccgcgcgatgcggccaggatagaccgggctcaacgagttcacctgcaaatacgcgccgcgatcgtcctcgacgaggatcacttcgggcagcatgaacttcaagcggggaaatgcctcgaacagctcgtcggtcggcgacgggttctcggcgtcgaaacggttgaacgagaagaagacgggctgctggccgacggggccttcgagctcgcattcgatgccgtcgagcgcaggcagcgcaatgcagcgccccatgcccatgaagcggacggggcggtctttgcgatagtagacgaactggtcggtgaaacccttctgcagcgcgcaatacgcatcgacgatgtcggcctcgatcggttgcgtgtatgaaaagattctcgtcatcgtggcctctcccgccttcgtcgccttgctcccggcgcgccgaatcgtcaacgatttccgcgcccgcatcgcattctagcacgacgtcttctacactattcctgtccgacggcggacgcacgcatcctcgcccgcaagcacgcaagaaaggcacactatgaaaaagttcttcgaggagttcaaggagttcatcaatcagggcaacgtcatggacctggccgtagcggtggtcatcggcacggcattcacggccatcgtgaactcggtggtgagcgacctcatcatgccgttgatctcgctggtcacgggcggtatcgatttctcggacatgaagatacccctgggcacggggcccgatgcggccgcgttcacctacggaaacttcatcaacgcggtcatccagttcctcatcatcgcgctggtggtgttcctcatcgtgaaggccctcagccgggcgcgcatgctgacgcgccggggcaagcatatcgaagagcaggatgccccgaaatgccccttctgcctcgaggaagtgaacgagggcgccacccgctgcccgcactgcaccgccgagctgcccgccccggccgcggcggccgcgaaagcgggaggcgaagcgtagggcatctcaacggataggctcctcatcttcctcgtcggtcacggcgcgcaggatgaagaatcccgcgatgccggcgatcagcgatgccgccaggatagccgctttcgccatggcgatcatgttcgggtcgacgaacgcgaggttcgtcacgaagatggccatggtgaagcccacgccgcccagaaccgacacgcctccgatatggccccagttcacgccctgcggcagatcggacagcttcagcttcacggtgagccacgtggccaggaagatgcccagcggcttgccgaacagcagaccgcagaacacgccgatggtcaccgggttcgtgacgatggacaagggatccatgcccgtcagcaccacgctggcgttcgagaacgcgaacagcggcaggatgaagaagtacacggggatgtgcaggcgatggtcgaggcgcgtgataggcgggatggacaagcgcgacacgcggccgatctcggccacctcggacaggtactccttctgcacgatgtcgggctcgccggggtcgtagcgatcatcggcgcgacgggcgcgggcggcaaaccagccgggagcacgatcgagcttcacctgcgagcgcgccgggatggcaagcgccagcagcacgccggcgatggtggcgtgcacgcccgacatgagaaagcacgcccacatccccaggcccacgacgaggtacggcagcagatcgtagatgtgcagccggttgaacacgatgagcacggcgaacaggcccaaacccccggccagccacgccacgtcgaggttcgcggtgtagaagacggcgatcaccatgatggcgatgatgtcgtcggcgatggtgagcgtcgagaggaacgagcgcagccccgccgggatgcggcttcccaacagcgcgagaatgcccaggcagaacgcgatatcgttcgccatgggaacgccccagccctgctcgaacccgctgccgacgttcaccgccgtgtacacgagcgcaggcacgatggcgccgcccgccgcgcccaggatgggcagcagcgccttgcgcgggttcttcagctcgcccgccgtcatctcgaacttgatctcaaggcccaccagcaggaagaaaatggccatgaggaagtcgttgatgaagtgctccagcgagaggtgcggcgcgaaatcgcccagcgagatgccgatgtcgaacgtgcgccagaactcggcgaagtacggcagcaccggcgtgttctcgatgacgagcgccgccacggccgcggccagcatgagcatggtcgcgcgcgtggacgagtgggtgaattcgagcagcttgcgcttgcgccgatggtggcggcgcacttccggctcgaggatgcgctcggtgggcgcacaggtgggatcgccgctcagacaggcgggtggcgcctcgtcgtgcggggtacggtcggggcgggcaggcagccggcagccttcacgctgcgacgcccggtcaagctgcgcaggtgcttgacggcgttcgcgaacctcggaaacctcgcgtccttcacgcgatgagcgactttctgattcgggtgtggttttctcagatggcatgaatacagtatacgaaacgggctgcggcctcgcggtcacagcccggtaacgcgcggaagattttacaatgcagcgttaacagccgttcgcgcacgcgaatgcgcggtcgtcacgacaaacgccgtgcttgacgcggtcggattcctcggaggttttcgcatcgttccagcgatccatcgttcccacgagataccccgtgatgcgacggatgcgatcgaacggcaccggtgccagctcgtagcggatgtccacgtcctcgccgtccaccagcagcgcgaggccggtaacggcgctgttcggatgcttcagcgcgccgcgctcgaggtaggcgcggatctccgtttcggtgacgtgctggtcgccttcgttggcatagcccaccagcacgtccacgccgtcgacggtcagccgctcgttgaccaccatgtcgcccatcgcgttcgccacgcccataaccgcttccatgccccgctcctcactgcattcgccgtttggtcttatatgttattgtaatagtatcattaatgaagggcgcgcgccagaggagggagggagcgatcttgcaacatggtcggccggtcggggagcggctgcgcatggcgttcgcttcggcgggtgcattatcggcccaaagacacggttttcgcgggaattccgtgtctttgggccgataatgcgttccgccgtccgcaagatgggcagatgcgcgattggactgctctatgcttccccgtcggactgcgagggcttgcgctcgtgcgtttcgttggaatgcgaaacggacggggtgtccgcgtccgcgcctgccccggtttcagccgcgcccgccgactgcgccaagcgggcttgcatcgccgcgacgaggtgggatgcggcttcggccttacgctcggagtcgcgattgtagcgagctacgttaatgagacagacgaccatggcggcatgcacgagcagggcgacgctcgccgcgagtaatgcgaaaagcaagagggggagcgtcccgtagacgttccagacgttcgccatcagcccccataggttcagggtatcggccaaagcaatagctccgggactggcgaagaagagggatgcgcacagcaggacgagcccgccgacggcgctgcgcttcccttccttccgtgcggcgaccctttggtcgtccgtgtagaagtcctcgatgtacgggtgccgccgccggaacgacccatgcacggcgaacgcgcggatcagcaaggcgaagcccaccgtggcgcacgcgaagtacgcgatgtacgggcgcgcgccgggattggctccgttcatgttcgagaaggcgatggccacgccgaatcccgcgacgaacatcgcgaggcccgccggcaccgtccacgctcggcggcgcatgtgctcgtcgtagccgcaggcgtcgacgggcggcgcgtcctcgggcagcgatcgcgtcgggtcgggcgcgcggccggttaggtcgccccgcaccagatcgtccagcgtgcattcgaacagatcgcacagcttgagcagcttatccatttcgggatagcttttctcggcctcccacttcgccaccgactgccggctgacgccgacgagcatcgcaagctcggactgggtcatgttgcgcgtgtcgcgcaggtgctgaagattgtccctgaagctcatggtcgatctcctctcgcagggtgcgtccggctgttccttcgacttgcatcatgcaccgaaacggcggttacctcaaccaacctcgggatgctttttcgcggcatccgctgccaaccggcggttgtcaccgcaggtcaacgtctgaagagcagatcgtctgatgacaaaaacgtacggatgtttcacgtgaaacacaggaagcccctcgaatgcactctgcgacatggaaaggacccgatccgggttggcgcatgaaaactgggcgctttcgcacaaaaaggcacggtatgcgacgtcttgctggaaacgacttttcgaacggtttcgtttgttttggaaaacgcctgatcgagattgtagtgcttggaggaacgagggaagcttcttcgacagcatggtctgaaaagcgctttttgatccttcgaacgtcgcacgtcgcggattttagtgcattggagaggacatcgcatgcaaggagcatgctagaaagggaaacacgagttccgtacaaatgtttcacgtgaaacatttcggctgggggccggagcgaaattggtcgtgaggcgatggacgcggggggcgttgcggcttcggcgggtgcattatcggcccaaagacacggttttcgcgggaattccgtgcctttgggccgataatgtgctcctccgtccgcaagacgagcagatgcgcgatgttgcgacgcggggcaaccggcgcgggacgccacacggggcggcgttgccgattgcgcacaaggcggcttcgtgcgaagcaggatcgacgtggctggttgagcgcaaggcgccttcatgcaaagcggggccgccctttcggacggccccgccgaggtgcgcgattgcgcggctacgcggatcgcgtcaaccttacagcttgaagtcctcgtcgccgttgaagacgtcgagggcgtcctccacggagtagtcggccagcgtgatggcgctgatggccttcgtcaggcggacggcctcgtccagcgagcgctggtggatgttgcggccggtggcgttgcccacggcgccgcccgtgtggatctggtcgtacagctgcgtgaggaacgtctcggcgtccaccgtcgagccgccggcgcacacgaggcccgtgcggccggacgccatcgtggcgaccttgagcgcctcggccggcgaagagccgtcctcgggcttcggcgggttcaccttcacgaagtcggcgccgaggcacagggccacgcccgccgcgcccgcgatgagcgccggatccttctcggccttgacggccttgccgcgggggtagatccacagcacgaccagcaggccgttggcgtgggcctgggcgatgagctcgccggcctcggccatcatggtggactcgtactcgctgcccaggtagatggtgtagccgatgcccacgatgttcacgcccgcctcgcgcatggccagcacggcgtccagatcgtagagctgcggcgaataggggtcgtcctggctgccgcccacgatgttggtcttggagttcatcttcacgaggtagttgatctcgggatagtcggcggcgtattgcgcgatgagcccgcgctggccggccaacacgccgcacacgccctggcgcccgatctcgaagaggtgctgcggctcggcatcggcgatgtcgatgccctcgccgtagaagtccttgttgaggtgctcgatcttctgatcgcacgcgaacagcatgagacggcccgttccgcgcgtcgccttcatgaagttctcgatgtactcgtcacgggattccggcatgacgtcggccggcaccctcacctggtcacgagtgattttgggcatggtttcctccttataggatccaactcaacggatgaggctcagagccttatcgatacggtcattctagcgaaaaagcgaggcgggacgcgccgtttcaccgaaaaaccccgcgaacgagccaccgattcgcgcgaagcgcgggcaggcggtaggcggaggaggcgcaacggcgaacaagcggcacccgacggacagtgcgcgaagcgagaacccggatgtttcacgtgaaacatccggtcgcgcgaagcgcgaacagggcgggagcgaagcgacccgcccatgcgcccgaagggcgcataagaagctcgcaggtggccgcgcaggagcgaagcgacctgcgcctcgcgcggagcgcgagcacgcgctcgcaggttggcgcagtgagccagcgagggcggccgtggcggccgccctctacggggacttgcttcgcgacacagcgtcggcaagttccggcggccgggaggccgccggaaccaaactagaaccactcgcgcttgttcagcacgtagatctgctcgaattcagtctgggacttcgtgaggtacaggatgccctcgatgatggcgatgacccagatcacccatgatgccagcgagaacgtcagcacgccgccgatgatggtgacagccagcatgatgaaaccggcggtgttgtagcccaggtagaacttgtggatgccgaacgcgcccaggaagatggccagcaaaccggcggccacgtgatccttcgtcgtgaccataggctggctgtacggctgctggtagtacggttgctgatagccgtagtacggctgctgcggaggcacggctccggggccggcatgcggcggtgtctgcggcgcgccgtatccgggaggagcgtaatagcctgacgcaggctggccgggagcaggaggcgcacccgcaggctgcgtgtaagaagcggtggaagcagaggcggcagccggagcctggggctggggctgagccggggtagcctgcggtgcagccgtaggcggaatcgcctgagccgtcgagtacggaacccactcgggctcgggttcggcagccttggcgggctcggcaggagccgcagaaggagccgccgcagaagcctcggaagcatcctccgtcgacgcatccgtcgatgcgtcgctcggcgcctcttccttatcctcggacccggcatcgcacgagacgaccgccacatcctcgaccacgacggcttccacttcgcccgtcgcttcgtcgacgaccacggctgcaaccgtctccttttcaacgtcgcatgcatcgtcggacgtcgtcgcggcaagcttcgccttcgcggcttccagtttctcctgagcggctttgagctccgcttcagcagcggcaacctcgtccgctgcgctattcaaaggttcgttggtggccatgatggacccacctctcattctacaaattgcgtcgatgtcctgtaccgccatagtagtgcgcgccgtcgcatccaaggaggtttcgtcacaataccgtcaacgacgttcagtatttcttaagatttgcgcatgggccgaagaaaagcctgatcgcgttagctgtctttatgcgaatgcttctcgagcattttcatgatgcgctcgcgaaaaacgatgcccaacacggcgatgacggccgccaccgcgaagatgatcgcgctttccataaggcgtccgtcagccagcccgtcggcggcgtaggtggacaccacgatgcccggaatgcgccccacgttggagagcagcaaaaatgtgcgcattcgcatgtccgtgagcggcacgaggtacgtgaacacgtctttcggcagacccgggatcaaaaacaggatgaacacgatgatgttcagcttgccggttttctcgaacttgcggaacttttcgaggtactgcacgggcaccatgctctgcacgaacggcgcccccagcttgcgcaccagcgcgaagatgaacgcgctggaaatgacgcaccctgccagaatgaccagcgcgccgatccaggggccgtacagcaggcccgccgcgatctgcaccacctcgccgggaatgaacgccacgacgatctgcagaaactgaagtcccagcagtatgaggaaccccacgggacccgcgccgcgcacgtcgttgatgatgcggtcgaggccgcccggctcgaacaactcgtggaagtacggccatagcatcaccacgatcagcaccatgatggcgaagaacgcgatgagcccgacgaacttgaaaatgtcggccttctccatcttatggccgcgcacctctacctcttgctcggctttttcgtgcagcttgtccttcagcttgtcagtcatcgtggcgagccttgtcgtactcctctttgaaggccgcgaacatgttcttcttgggcgcgggcttcttggcggtcgtcttcttcttgggcgcggtcgacgcgggcttcgcaggcgcggaaacgccctcgtcttccgcctcgtccgtcacggccagagcctggtcgtcggaaccgggcttgacaccgcgcgccttgtcgtactcctccttgaacccggagaacatccccttcgtggcggcgatctgcttgcccgtggcgtacgcgcccttgttcaccacttcgccggttttcttggcggcctcgctgaccaccggcttcgccctgtccaccgtggtgtgcaccttgtcgacggcgacggccgtgaccgcgccggccttctcggccacgccgccctcggcaaccaggtccttcgcggcgtcgtcaaccagcatcgcacccagcaccacttcgtcggtttcgcgcccctcggagcccacctgcgccagcgcggcacccattccgcggcggaaccccttgacgaggtcggccggaatagtgcgcttgcccaacagtgcgttggcggtggcgcccgaatcggtgtcgaacgtgtccaccataccggtgatgcggttgaaggtgacgttgcccaccatgcccagcgaagtaccgtcttcggtcatgaccggcagccccacccacagcacgcaatcgtcccagttgacgcccagcgccttgcatgcggcgcggtccgtggcctcgggcacgttgcggatggcgatgcggccgtccacgatgtcgtaaccctcgatggatacgaacttgtccttgcggcggaacatccacagcagatcggggcgcttcacgatgaagccgacgcagcgcttctctttcgggtggaacacgaaacggcgcaccttgccgatgcgcttcgtaccgttcttgccgcccacgacgcggacgcccgtgagctcatgcgtagtgatgagtttgcttgccatggccttcttctccactcgacaacctgcgcatttgccgcggatggaaccgcaaccccccagcgccgttgccctgtcggacagtcaggaagcggcgagaggggcggggcttgcgcccacgtcgaccaactcgccgcttcatgatagatgcgtatgctacttgtcgtcgccggagatcttgtcggcagcgtcctcggccttgtccttcacggcatcggccgcgctctgcgccttgtcctcggccttgtcgacggcctcgtgcgccgtgtcggccgcgacaggaatggtgtcgctcaccgcgtcgtgcgcctgctcggcgttcttggccacctgcgaggcgatgcgctggcgcgccgcttcgatcttgtcgcgaagctcgtcgttcttctgcgagaacgccggcttgatgttgtcggcggcttcctgcacgcgctgcgtggcctggccgtacagctcttgacccttggcggccacgtcctgcacgacttcctgacccttggacgcggcatcctgatacgcgtgctgcatgttggcgccggcctgagagcccagctcctgcgcctcgccccatgccgcgctcatcttatcggtgaccatagcgcgcgtttcctgaccagaccggggggcgtacagcagcgcgacaaccgcaccggccaacccaccagccaaaaaagctccaaatttgttgcccatgacggcctccttcgggatgtttgcctgttcgttcattataggggcatccgcgcagccccatgcgcgaaaacatgagcgctctatgattcagttgctgtttcgttgccgaccgaacagacgcgaagacgggccgccggcctacgacccgtgaatcgcatactgcgctctcgccgcaagcggttaccgcgcatattggctgaccagttcgttgaggacgccggacagcgacaaaccggaggcttcgcaggcgagggagaacggcgaagattcggccagggagggcgacacgtccacctccaggacgcgcgcctgggctccgtcccagacaagatcaacgcgggcgaggtcgcgcacctgataggcacggcacacttccaaggcggcgcgctcgatttcggcacggatggcctgggcatcggcctcgtcgttcgacaacgaggcggggcgcacaggtgcgaacagctcgaccgcgcccggcgtgcgacaggcgaccgtatcgcagaagccctccttcgccacgatctccaccggcggcagcgcgtaggcatcccagccggagcccagcaccggcacggttacctcaacgccgtcgatccactgctcgatgatgacggcgtcgtcgaacgacagcgcatcggacacggcttcgcccagctggtcgacggaatcaacgcggcgcacgcccgaagccgaaacgccgtgcgcaggcttcaccgccacgggatacccgccgatcacgcggtcttccaccaggtcaaacgccgtcgcagcgcccatgctctcgaacgcctcgcgcgcgatgcagacgccctgcggccaggaagccgtcggctcatcgccggtgatggcgcggtaggccgccatctcggagccgagggaggatttgtcccaagcgcgccggcacacgctggacggcgatccgacgaagggcacgcccacgaattcgagcaggctctggacggttccgtcctcgccgagcttgccgtgcagggcgttgaagcacacgtcgggacgctcgacgcgcagggcggaaacgaggtcggacgaagcatccaacagcaccgtcctatggcccgcctcttcaagagctgcgcacacgttcttggcgctggccagggataactcgcgctcggtcgagctgccgcccgtcaacactgctaccttcatgatgatgctccttctgccgtccacacaagagcggctagcgtaccatcgcatcgccgaggaaggcaatcgcatcgcgaaaagcgcgcaaagcgaccagatcgtcgaggaagctcacctcgatgcgcgcgcggcccgccgcctcgtccgtccactcggtggtgcccacgaacacggcatcgagagcggcgccggcatcggcgtaagcggcggccgaaccggcttccgcgccgtcgcccctgcgcacggccgcccgcgtttgaaaatcgatgaccaggtgctccaacagatgcggcagcgacgtgtggtccatgacggcggcgaaagtgtcgccctcgtcgttcacgcaggcatggcgcggcacgtgcggatgggccgcgcgaacgcgcgccgcaagctctggcgtcgtgcggcgcgggacgccgggcgccagaaccacgtcgcacaccacgcggtcggcgcgcaccgtgagccgctcgatgacaagcggggctgtgccctgcgcgctcacgcgggcaggtcgctcacatcgaacacgccgcgcgtgccggatgcggcagcatcgtcgttcttgtcgacggcgtcggaggcgctgccgccttcgtctgcggcttcacttgcagaggcgtcttccggcccagaagcggaatcggattccggcttctgccgatcgcccgggtcgggctcgggcgcagcctccggctcgggttccgccgcaggctcgggctcaggctcaggcgccaccggctcgcccctctgcggcgtagcctccgcatcgtgcgacaggcggtcgagcaccgtgtatccagctcccgacggaggttcctcctgcggctggccctgaatcgcgcgcacgagctggtcgaactgccaggcgatgtcgtccgccagcgtagagagccatgtgtacccgcttccatcggaaatcaccagctgagagcggtcgagcgagaaacgatagcggccggagccctccatgttcccgaacgtgtacgagatggtcttcgcgtccgtgtccagcttgtacgaccagctcacatcttcggtcagcttgatagtttcgccgtcgatgaccacgacggccgtggtgccgtgagtttgccattcgccctggaactcggctgcatcgtcgtagcgcagccaacggtcccacgagaacccgcccacgatcagcaggacgaccagcagcaccgagccggccacaacaagcggccagcgctttttgcgcggcttcgcttccgcacgctcgcgccgacgcttcccgcgctcggcctcggtcgacgcttcggccccatcgtctttcgcagcgtcatcgacgattgccgccgcgtcctccttcaacctggcggccgccttcgccctgacctttgcagcgcgcgacgtctgctcgaggggcgtctgcccctcattctcctcaacgtgaggcgtcccggccgctcgcggcttcggtttcgcaggcggcacgtcggtgcgcttccgcggcgcgacgcggccggacgcccctggcttcgaggcgtccgtcgcgggtgcggcagcggtattcggtttgctggttcgtttacgcttcgttgccacgcttgaaggttccctggttcttttcgatagcttcgcctgccgttattccggcgcgatgacctcgacgccgcccatgtagggcaccagcacgtcgggcacgcgcacggtgccgtcgggctgctggtagttctcgatgacggcggccatggtgcgacccaccgccaggccggagccgttcagcgtgtggacgtagcgcgagcccttgaagttctcggggtcgcggtacttgatgttcgcacgacgcgcctggaagtccgtgcagttcgagcacgaggagatctccttgtagccgttgtacgacggcagccacacctcgaggtcatacgtcttggcggcggagaacccgatgtcgcccgtgcacaggctgatcacgcggtacggcaggcccagcagctgcaggatgttctcggcgtcggccaccatggcctccaggtcgtcgaagctctcctcgggcttggcgtacttcaccatctccaccttgtcgaactggtgcacgcggatgagcccgcgcgtgtcgcggccggcgctgcccgcctcctcgcggaagcacggcgtgaacgcgcagtacttcagcggcagctggccggcgtccagaacctcgccggcgtggatgttcgtcagctgcacctcggccgtggggatgaggtacaggccctcggtggtgtggaacaggtcttcctcgaacttcggcagctggccggtgccggtgagcgtctcggcgttggccatggccgggcaccaccattccttgtagccgcgcgacgcgtgcgtgtcggccatgaagttgatgagggcgcgctccagacgggcgcccaggccgcccagcaggatgaagcggctggcggctagcttcaccgcccgctcgaagtcgatgatgcccagctcggggcccagatcccagtgcggcttcatctcgaagccctcggcggcgaagtcgcgcggcgcgccccagcggcgcacttcggggttgtcgtcctcgtcgtcgcccaccggcgtggaatcggccggcatgttcggcgtgcgcagcagcacctcgcgcagggcctcgtcggccgcttcgcgatctttgccgatgacggccagctcgtcgttgatggcgcgcacgcgctgcttggcggcttcggcctcgtccttctggccggcggccatcatctggccgatcgacttcgacgtggcgttgcgctcggcctgcagcgcctcctccttcgcgatggcggcgcggcgagtctcgtcgagctcggagaagcgcgccgcgtcccacgaagcatggcggttcttcatcgcctcggcgacggcttcttggttgtcgcggacgaacttgatgtcgagcatagtcgcgctccttcacgatgggaaacaatagtgcctttagtatacctcacgggcggcgcacctcgtcgttccttcacgcacccggcatgttccgtcgggcggccagccgacgcccttatccttcatagcgctttcgcacgtacttgatgagggtggccagcacgcggcgcatgtcgatgggcttcgacagatgcgcgttcatgccgctggccaacgaggcgctcacgtcttcggcgaaggcgttggccgacatcgcgatgatgggcacggcatccgcatcttcgcgatcgagctcgcggatgcaccgcgtggcctcgtagccgttcatgttgggcatctgcacatccatgagaaccgcgtcgaagtagcctatcttcgacgcctcgaacatgacgcacgcctcggctccgtcccccgctcgctccactaccagccccgcttccgccagcagttcgcaggctatctcggcgttgaggtcgttgtcttcggccagcagaacgcgcagcccctcgaactcggtgcggtcgagcgcacgcggcgcgcccggcataggggcttcgtaagccgaaacgggacggctcgccagccgatcgcgcgcgccgagggatcgcagcgccgccgcgctcgcagcatcgagttcgaggggctgcgcatcgtccgcctcggcgccctcgccctcctcgaacacgatgcgctccgcctctaatgcgatacgcaggttgaacgtcaccgtgaacgtagtgccctgccctttcgtcgactcgacggcgatatcgcccgccatcatggtgacgatgttcttcacgatgggcatgccgaggcccgtgccctgctcgcgcgagcgtccctccatgctgaacggctcgaaaatatgctccttgaactcctctgacatgcctatgccgttgtcggataccgtgaacttcacctggcgataccccatggcggcacccttcgccaccgtggtctcgaaccgaacgcagccgccgcagggcgtgtacttcacggcattcgtcaacaagttcagcaacagttgcttgatgcgccgcgcatcgcccacgaacacggcatcggcgcatggcggagttgtcacgacgaattcctgggcgcgctgttcgcactgcacgcgaacggcggatgccacgtgcgacagcacggcgctgagacggaaaggctcgctggccagggtcatcttgccgttctcgattttcgagatgtccagcacgtcgttgatcagcccgagcagatggtcagatgcgtctcctatctttttcagcgtctcggcaactttctcgcgatcgtccggattgctccgcgcaagctgcagcgttcccagaatcacgttcataggcgtgcggatctcgtggctcatgcgcgagaggaactcggactttgcagcattcgccgcctcggcaacgtccatcgcatccttcatggacaattggatctccttgtcggccgtcacgtcgcgcatgaccacgagcagctgcggcttatcttcgaacgtcagccgcttgaccgagtaagaagcccagcattctttgccggtctgcttgctgcggaacgagaactccccttgctcgaagcccttcgtctcgtccttcctaatgcgatcgaacagagccacgccctcgggagaaagccctatggtggccgccaaccgctcgttttgcagaaaggcgtcaaggcgatagccgatgatgcgttcggccttcgccacaatgggagtgaccttgccgtcggtgggcgaatagaggttcaccgccatatcgatgctgtcggacagcgcctcgtacaactggccgagcatggcgacgttctgttcgcgcaggcggcggcggtacgcgccgaacaccaacagcgccaccaccacaaggcaggcgaagatgatggcgaacaccgcttcgaacgtggtggtgaccacggcagcttcggcacgcacgttctcgacgggcaccacgttgcacacgtaccaatacccgttgtcgaccggcgcgacgcacacataactggatttgccgtctaccgtggccgtgagcagccccgtctgcttgttcgccacaacgtcgcgcagcgtggaaaggtcgctccgcgagcgcgactgcatgaactgcaaggcagcttcggttgagaccgcggcatcggtgttcgaggccggctcgctgtactgagacgcccggtcaaggaagtcgtacagcgacgtgccgatgaacaccggcgtcttggtttcgcccgtgggaggcaccagcacctcgccggtggaaccctcgaacaacatgaagtagccgcggccgtcgaacatatccagctgacgggacatagagaacaagcttaacggcacctgcacgtacagggctccgacttgctgcccatcgatataaagcggcgtttgggcgagacgcacgcgggcgcccgcctcgttggcgaacgtggcagagtacgaactgcgaccctcggacaaagccgtttcgggctgagccagctcgtcgacggaaaatgcggagccatccgcgcgaacgcctcgaccgtccatcccggcaaacgtcgcattcgcaaagccgtggtgctcctggaagctgctgagagccggcgcaaccaacgcaggatcggtagtctgcacggtaaacgcgccgatggcgttctgcgacatgtacatgcggtcggttacgttgctggcggattgctcggtgaacgtgaccacctgctgctcggcgctctgattgagcttcttgtcgataaaagacgttaatccgagcacagcagaaacaatcgccgccacaatggcgacgattgcgattgatgccgttatgcgtcgtttgcgtttgcgcttgtctttgcccatggcgtgttggtgcttgcccttcttcagcgcgcgtaaagaataaaggaatatccaagcctacccgtaccggatcggctcgacatagtatactctaacgctgaactgcaaacactctgtggcaatggtgatgtcacgagttagagtaacgaggtaaccatggatttcggtgcgttgtacgattttctcttcaacacctacgccggcatcggatgcctggtgggaatcggtttggtcgtaagtttgatcgcgtgcgtcatcatggagcgccgcacgcgcaaaacgttcgtcaatcacgagcctgacgaggacgattggtcctttttcgatgacgacgaagacgacaagtaacgtcttcgcgttcgtgccgaacggcgaccagacgatgaggatcgccttttgaaaagctccttgcacgtacgcgcgatcactgctttcgagtctcgccgcgcgcagcttttcagctgcgcgctcctgttttcaagccgtcaattctcccgcacactcaaaccatataattgaacctcatcgcctcttgacaacccggaaaggaagtacttccatgaacgaagccgaaacgcatctctaccagcgcgaaggagcgtacatcccccgcgtcgccgccgtgcatgatctgtgcggctacggcaagtgctcgctgggagttgccattcccgtgctgtccgccgccggctgcgacgtatgccccgtgccgacgggcttgttctcgtcgcacaccgccttccccggctggtacatgcacgacaccaccgagatcctagccgactacctgaacgcatggaagggcatcggcgtggagatagatgccgtgtactccggtttcttgggcgcacccgagcaggtggatcgcattcgcgatctgtacgctatgtatccgaacgctttgcgcgtggtagatcccgtgatggccgaccacggcaaggtctaccccacgtatacgcccgagctgtgctccgccatggccgagctggcttgcggcgccgacatcctcacaccgaacctcaccgaagccgccatcatcctgagcgagcccatcggcgaagattggggcggcaccgacatctccgacgaagaagcgcaccgcctggtagatgccctcgtggcgaagggagcgaagcacgtggtgctcaagggcatccagcgcgagggcgagtcgtgcatccgcaacttcgtgggcggcaaggactgcgagacgttcgaagcgcataacgaatacctgccctacatgttgcacggcacgggcgacttgtacgcgtcatgcctgatggccgccgtgatggccggtcgctcgctgcaggaggccgtcgcgttcgcaggcgacttcgtgcacgacgctatgctggtgagcgccgaacagcccgacttcaaagaccgcggcgtcagcttcgagccgctgctgggcaaggtgtgcgagctgctgtaggagacgcacgcaacctgtcaacgcgttgccgaaacggccggcctttgcggcgaaaccgcacgtttcgggcacgacgcatcctccaagatgtcctccgatggggtcgggcgagaaggcgaccgcccgaccaccttctcttcttctacagcttgaaccccagcgattccagcacgtacttgggaaccatgaagcggacggtcttctgggggtccaccatctggcacacttgcacgtcggccaccagcgacagcagcatgaccagctcggcctcgtcgacgccggtgcggtcgtgcagcagatccaccatctcgtgcacggcgcgatcggccgctgcgtcgagagactcggcggacgcgatgatgccgaggtgcgtgccgttctcgataagcggatcaaccaggtgcaggtcgggcagcgcagtgagcgtgaccgtagcgtagccggccacctcggcgcccgacacgctaatctcgccatcgcccatcgccgcgtgcatgtcgccgcagccgaacagcgcgccctccaccgccacggggaagtacagcgtcgcgcccgtggtgatggcggtgttgtccatgttgccgccgtggctgccgggcgttccgcagttcaccggatcgcccgccggggccacgccgatgacgccgatcatggggttaagcgggatggacagctggtcgttccacactagcttgtcgccgtcgatagcgcacaggtgcgtgctccacgcgtcgaagcggtcgccgcacacgccctcgtccttgcccgtgcacgacgcggtttgcgggtcgagctcgatgttctcgatggtcaccttcagcgcgccgccgggcaccgcgccctccacgaacacggggccggttgccgggttgatgcgatcccagttgatctcgtccagctcgtcctcgggcgtctgcacctggtttccgaagcagtcctgcgtgcggatgcgcaccgtctcgcccgacgccaccgtcagcgccggctccaaatcgcgcgcgaacgcgaacagcacgcgctcgtcgttaagttcctgcatgaggccaccctttctacaagattgtgctgaggttaatagtactacggagggggccggctcggcagcatctcttgtgtcggattcttgctcgaaaaatacgacgagcaatcaagcggggggggaccgctttcgcgagtttacgcttcgccctcgtaatcttcctcgtagtaatccggctcggggacgaggacgcacatgagcagcatcgccacgatgggaacgagcgtgaacacgaggttgttgaaggacggcatccaggttgcttgccccgacgcgacccaagcggccaggacgatgcccgccagcagcagagcgctcgccacgagcgtgcccagcacggcgaacgcacgcgtcgggcgcaggcggaaggccgacagcgcacccgtagccgcaatccagctgatcacgatgcaccacagcgccggctgcatcaacagactgccgatgctggcctgcacgtcgagccccgcagagaactgccagttcgtcagcgcgtcccaaccaagcaggctgtgcgacccgcatgcggccaacatcacgctgaccaccagcgagaacgccagcgctccgaacgcgcgcgcaggcggcaggcagaacccggccacgagcggcgtcagctggttgcagccgaacgccccggcaagcggcggcacgagcgtcgcgttcgcatcggcgtcgcccaaacgcccggtgaagtaccaccaggccgccgtcgccgccagcagaacgcatcctgcggcgggagcgtttccggcgatgagcgccgccgataacgcgaagtatgccaacagcgcgccgagatgcggcttcaacgctcccgccaacgtcacgagcgcgaacagcccccagaacagcgggttggcgaatccgctggtctgcggcagattcgcgaacgccacgaacgcgaccgccccgctgcccagcgcgcccgccgcatgcgccgccaccgtgcgctgcagcggcgtgatgcgctcgcggagcggcacatacggaacaggtggcgcggtctcggtttcctcttcctcctcatcgtcggcgtgaccgacgatgacggagagctcgcgcacgccgcgcttcggatcgcccaggaacggctccagctcctccgcgaaatcggcgaccgtcgcgtagcgctcttcccggtcggggtcgagcgcgaagaagatcacgtcgtcgacggcggggtccagctcgtcccagcacagcgacggcagcaccagctccgcatcttcgataacagcttcagcgcgctcgagatcgggtgccagaaacgggttctcgcccgccagcatctcgtacgtcagcgacgccaacgcccattcgtcgcagcgcacgtcgaggttctcctggcgcatctgctccaggggcatgtacccgatggttcctccgccggccgcgccgtagccggacgcgtcggccagcgtggccaggccgaaatcggtgactttcacctggccttgatggttgatcagcacgttgtcgggcttgatgtcgaggtgcagcacctggttggcgtgcgccacctccaacgcgtgagacaccgacgcgaacacggcagccaccacatccaatgtgagacggtcggcgtgacgatgcagcagctcggtgagcgtgacgccttcgacgtactccatgatgaggtaggcggtggactcctgcacctcgaaatcgtacaccgcgacgatgctcgcatccgacagcattgccgcggtgcgcgcctcgtccaagccgggaacgtgcgcgagagaatgtaccagcggcccgtcgcctaccaggtcgaataccgaagtcgcatccccttcggcttcgtcggcatcgttgaaaacgggatcgtcttcccagggaagcggctcgtgctgcggcgcgcgctgcgcgacggcgttcgcccccggaagcgccgcgcgcgcggcgtccacctcatccagctcgatgcatttgatggccaccttgcgttggatgcgcgtgtcccacgccacccgcacggtgccgaagccgccggctttcgcttcgccgatgggtcgataccggttcaatatgagctgtcgatcgcgtgccatgcgcctattatagggcaggcggccgcagatgcccacgcgagctgccgcaacgcatgccttgcgcaaaaaccttaacccctatgtgcagcaaaatcgagcttttggtagtgattgctcgcgttcgccgcctccaaaaacacgcggaagagccctggcaagccgtcagcgaaagaaaccgcaggtcgcgttttgtccatgtcgcttgagaatcaagcaagactgccaaaagctcgattttgctgcacatagcgctgaagatttatgcgacagcgagggcgacaagcagcgagcagcgagcagcgagcacatcatagcgcaagcaactgcgcctcgctccgccccaacagccgcgagactcagaacgcagcctcgagaggctcgctcacgcgcacgcgctcctggccgcgttcaagctcggtgatcttgagcagcaggggctcctgcgtgccgtcgagcatgcgcaggcgcagggtgaccgcatcgtcgtacacggtatcgagcactttcgcaccgcagtccgacgcaatgcgcacgagctggtcgtacttgccgtacgccgctcgcacttcgatgtccacgcaccgcgacaccaccaccagctccgccgcctcgatgcccgcctgcgtggcctgcgtgtacgcgcgcacgaggccgcccgtgcccagcagcaccccaccgaaatagcgcgtgaccaccgtgatcacgtcggtcagccccgcgtgctggatcacctcgagcgtgggaagccccgccgtcttctgaggctcgccgtcgtcggaatagcgcacgcgcccttgcacgcccgcgccgccctcgcgcagcacgtaggcgtacacgttgtggcgcgccatgcggttggccgcgcggatctcctcgaggaacgccagcgcttcatcctcggtttcgacatgcgccaaactagcgatgaagcggctcttcttctcctcgatctcggcggtcgcccgccccgctatggtggtgtaggaagtcatggggaaagtgtagcagacgcatagcagggcagcaaaaaacccgccgaagcgggtttctcaattcagatggtgcgggcgagaggacttgaacctccatggggttgcccccatacggacctgaaccgtacgcgtctgccaattccgccacgcccgcacaacaaaggcttcttatcgaagcgattgaacatggtacctgagttcatggatcgtgacaaggagaaattacacgttctttgaatttttctgaaagcgtcgcagcgccgaccaagccgcgggaaccagaagcgccgtcgagacagcaagcagaacgaagtcgatcgggtcgccggtaacgtaggtttgctgcaggtttcccgccagcagctgcgggcccgcgtacaggaagttgaacgcggcgtgcacggcgacgagcgtccacaagttgcgcgttccgaagtacatcgctgccatgaacaggccgaacaaagcggcttgcacgggtttgcacgccgtttgcgcaaccgcgacgaaatcggcggcctgaacggccgaggcagcctcgcccagcgacacgtgcagcgcgccgaacagcacggccgacacgagggccgctcgcagcatgccgcgtcggcctcctcccaacgccggagcgaacgcatcgagcgccagcacccggaagacgccctcctcgaacacagcggtcaggaggcaaagcgcgaccacttgcatcacgtgcaacggggaggcgtccaaagcggccccttgcggttgcacgaccagcgacgcgaggcccacagccaaacccacggccagcacgtacaaggcccacgcgagcaaaccgcgcccgtcgcaaaggcgcggcgcgcgcaaagcccgcggccgcgatgccgccacagccgcaagcgcgaccgcagctagcgccgcgccctgcgcgagcgacccggcgagggtgtcgccggggaccagcgagaagcagcacgccgttgccaccaacgccgccacgaacacggcggcgcgatggttgcgcgcgcaaccgccgtcctcaagccccatcgtggaattcgcgcgcgtcacgcagcctcatcgccctttgccatcgaatacatcgtatgcaggcagtatactggaacgccatgagcgtcacatcgagcatatcagcagcttccccgatgcggggcgtttcctcgttcacgctcaaagtcgtggccatcgtcggcatgacgttcaatcacgcctgctacattttctatccctacctgcccgccgaggcgctgctcctgctgttcgggttcggtgggctcaccttccccatcatggcgtttctgctggtggaaggctatcatcatacctcgaacatcaagcggtacgccggtcggttgctggcgttcgcgctcgtctcgcaggtgccgtacggcctgtttctggcgcacaacctcaacgtgctgttcaccctgctcatcggcctgggaattctgtacttgtacgacactatggaaagccgcggcggattctggcttgctgccgcagcgctggtgacggccagcgcgctgtgcgactgggggatcatcgggccgctcatgatcctcatgatgcgcgcgatccccgaccggcgccaacgcatcgtgttgcccctgctcgtgcccatcctgggcaacggcctgccggcgctctccgactacatggcagcgttcgatccagcgctgctgccgttcgcgctgtatccgctgctgggttgcacggccaccatcccgctgctgctcgcctacaacggctcgcgcggccgcccgatgaagtggctgttctacgcatactaccccgcgcatattctggtgctggggttggcgaaggggttgctgctgggcgattgggggctggggctgtagaggctgacgccgcacgggatccttcgactccggcgctgcgcgtctccgctcaggatgacagaggacggctacttccagtcgcttcccaacaccacgaggaaatcgctctcgaacagatacgatccgtcgtttttcatggcttttccaacgccaagagcatccgcgatctcctgcgcgcgcgatgccttcgcctcatcgtcgtaaatcaccagcgtcttagggtagtcgaagctgtcggcattgcccgactccaccgaatagcccagttcctcgatgcgctcggacgcctcggtgcctgcgccggtgatgccgttgccgttgcgcaccgccacgctgcccgtgcgcttcgcttttttctgcgtgccgtcctcgttcgtgctggaatgcgtctggccgctgccggtggttgccagcacggtgttcgacatctcgtcgacgatgtcctcgtcggtgggcggaaggccctggttaacgcgagtcatcattttcttccattcgtcgacgttgttgatttcgtaccagacgtcgttgatgtacttggacgtagtcggctccatggccgaatagatgtcggtggccgggtcgaggccctgcatcgtctgcgcgaggccgatgatgtcggaaatctcgagatccgtagtcacgtattgggaaagcgcctggacggtggatgccatcgtggccacgtcggccgacaggattttcttcgcgatggcggacaggacgagacgctggttcgctgcacggtaggagtcgccgtcgccgtactcgtcgtaggcatggcgcgaacgacacaggatgagcgcctgatcgccgctcagcgtctgcagcccggcatccagatggccgccggcatcctcgtcgtcgatctccatcggaacatccacttcgacgccgcccagcgcatcgacaatgtctttgaagccgtcgaagttgatctcggcataatgggaaatgggcacacccgccaacttcgatacggttttcaccgtgagagcggctccgccgatggcatgtgcagcgttcagcttgttctgcccgtattcccccatgtctaccagggtatcgcggtggatggagacgagcgtcgccttcttgtccaccgggtcgatgcgcgcgaggatgatgctgtcgctgcggaactgatcgccggcgaattccgccgacgcttcgcggtcgttcgacccgtcggttcccatgagcaggatatagaacggctcgttcgccaaatcggtttccacgagcgcattgcgcagctcggcgctgacgccgtcgtgaaggtttcccgagagtacgttgtagtacgcgaacgcagcccccgccccgcccagcaccagcacgcccacaacggcaagcgcgataaccagcgtgcggcgacgagagcgtgcgcgcgtgcgctcgtaatcggctcgcgacacgcggcgcggcgtgggagcggattcgccttgaacgctggggcgacgacccggttcagtctgacgggagcggccgtacgaggagcgggaaaaacgctcggtgctcgcagggcgccgttgagggctgcgtttgttgtccattgcgccattttcgcggcagcgctctacccgcgcaaccgcctccatcggtttactaggaaaagcccacagggcagcgcagcggaagcggtgtcatcccgagcgagcaccaggttgacgccgcaccggcgagcttcccgctacctgtgcactcccagcttcttgaccatggcgtcgttcgcatcttgctcgacggcgtcgtcgagcggcgccaactcgatggccggctggcccgttcgcgatgcgaaacgttggagagcgcgtgcgagcaaatcgtccgcaacctcggggttcttcgccagcagcgggccatgcagatacgtgcccaccacgttcttgtagcgcacgccgtcctgcttgtcggcatcgttgttgccgtgccccgtggaagacgccacggcgccgaagggctcgacgcccgcgccgaggtgcgtgcgtcccgcatggttctcgtaacccacgacagggcgcttcgccagcggcgaggtcagcacgatgttgtcgatgagccggtcgccggagccgcccgccgcacgctcggtggtcatgtcgacgatgcccaggccctgcaccacctcgtcgcccagcagccactcgtggccgagaatctggtagccgccgcagatggccagcaagacgccgccgtcctccacgtaggcatgcagctgctcgcgcatgttcatgagctcggccgacgccaggcgctgctcgcggtcggggccgcctcccagcatgacgaggtcgacgccggagaggtcgatggcctggccgtggttgacgcgcttgacctccacggggatgccgcgccagcgcaggcgctgttcgaggatgcgcacgttgccaccgtccccgtacaggttgagcaggtcggggaagaggtgcgcgatggtgagggaggcggcgggcgcaggagtctccccctctcctggcgcggagacggaacggtcgcccccacagccatcgcccgcgccatgggggcgggggaagccctcatccgtgccatgcgggttggcggaatcctcggccgcggcgcccgccgcgccgtggctggtcagcaccgcatgcaccgggggcaatgcggtgtagttcgcgatcaggtacgcgttttcttcggccgacaggctggctatgcgcgccagcaggtcctcggcatccgcaaccacctgcgattcgatgccggcatacttcaagcgcacctgcatgtcgttcgcgcgcaagccgcccgcgaacacggtgagcttggccggatcgtccgccagctcctcgaagtcgatatcccacagccacgacacgtcgcggccatcgccctccttgtcgttcacgaagaaggctaccaccttgtcacccgcgtcctgcgccacgatcttgaggttctgattgaagccggtggggttcttcgcgaggttcagcagcacgcgccgaccggcgatgtcaaacgtttgcaggcgcccgttctgcgggtcgaaggcgtcgatggccttctgcaacgcgggaagcgggcaaccggcgaggccggccgcggcagcggttgccagcaagttgtacaccatgtacgcgccggtgtacggcgcggcgatcgaacccgcggctgccccctcgccgtcccgacgcacgtcgaacgacaacccgttcaggcccagcttcacgcccgttgccgcgaagtccagggcggaacgcgcgaacccgcaggtgggacacgagaacgatcccagttgcccgtactggcgatagtcgtattccaacatggacgagcagcgctggcacatctgcgcgtcggccaccgaattctgcggcagccccaggtcctcgtccacgccgaacgcgatggaggggttcgccgcgcgctcggcgatgcggacgcacagcgggtcgtcggcgttgtacaccagcaccgtgtccggcgacttctccagcgcgcccacgatgctgtcctggatgcggtcgatctcgcccacgcggtccagctggtcgcggaacaggttgagcagcaccacgtaggtggcctgcagctgcggcaggatcttcgccagccacagctcgtcgcactcgaacacgccccaatccgacgggccggcgtgcagcagcgacgtcgccacgcccgagtccaggttcgcgccggtccggttgcacaccacgcgctggcccgccagctcaagcgcgtcggccagcaggttcgtcaccgtggtctttccgttcgttccaaccacgcacaccgagccctgctccagcttcggcgcgaggtcggcaatgagacgcggatccacgtacagcgcgattttgcccgggaagttcgcggcgggacggcggaacacgtttttgagaccccacgttgaaacggcgctgacggcgcgcgcgccggcgaactgcaaacccataggtcattcctttcgatcacgttgcgttcagtatagtggttccaccgcaccccgcacgccgcccccgcccgcactgacacccgccctccatacaaatttcaggacgagcagcgccagcgcaaagctcactcgtcacccctcgtcaacctaacagccgcttcaaccaaaagaagaaccgcgccccgatttatcctcaactaagcttgatgccgctatactgatgagataaggtgattgtgcagccgtcggccgaagcacgcggccgcatgcacccggcgacccaggaaggttatgcccgaacgcaattacgacgacgcttttttccagcattcgaatgacgagcgagcttcccgtcgttccgatgagtcgacttctccaggttcacgaccacaccagtacaacaccaggcaaaccgcacgttccactgccgcccgctcccgcctgaacgcaacacagcagcaaccgcgcaatgcggcatcctaccagaaaccaggacgttaccatcgaccgccgggccccgaacaaccgaggcggcgcgctgttggaatcattgccagcctgctcgtagtggccgctttcgccgttggagggtacttcgtcgtgcagagcctgcctgcctccataaccctcaatggagccaacctggaagtaggcggtcacaagacgttggaagacgcgctgcgcgccagcggcatcaagccgaaacccggcgatttcgttgccgtggacggctcggtgatcgaagcaggaaagggcgagccgtttcacgccaccgtcaacggcgaagtcgctaccgacatggatacgaagctgaacaacggcgacgtggtcgaactgggcgacggcagcgccatcgaagagccgagcgaaaccgccgaggaaagcatcccctactcgatcgaagaggaagggcgcggacctatccacgtgctcgaggggcaaggcgccgacggattgaagcgcacgaaaaccggctcggtctccggcctgacgacggaagaagtcgtgcaggagccttccaacgtggtgcgccgaaacgtttcgccgcaggtaggcgaggacaaagtggtggcactcacgttcgacgacggcccctggcccgaatccaccgccgcagtgctcgacgtgctggccgaccaaggggcgaaggccacattcttcaccgtgggcaatcgcatcgacggagaaggcgtcgacctcgtaaagcgcgcagcagccgaaggccatcagatatgctcgcactcgttcgaccacgcggcgggcgacggtcaaagcgtgaacctcggctacatgacgcctgaggatcaggtcgccgaagtgcagaagggctacgaagccatcgaagccgccaccggcgccgaagccagccatgtattccgcacgccgggaggcaactacggcgaaggcgtcatgcgcaatgtcgggccgctgatcagcgcggaaatcggctggaacatcgactcgcaagactggcgcaagcccggagccgccgccatcgccaaccaggtgaaaaacgcctggccgggcgccatcgtgctcatgcacgacggaggcggcgaccgatcgcaaacggtcgaggcgctcaaagacgcgctcccctatctcaagtcgcagggctaccgcttcgtcaccatggacgagctgctcggctatccgctctcctaaacctcgcttctgccgctcgccggacgaaggcctcctttgatcttcttcgggatcgttcgccgcgagacgtcgtgcctttggcgacaaacatcatcgaaaccacctgtttcctcaacatagacattgctatagtaaagtacgtgggccgcgcatgggtgcgaccgtttcagaaagaggggtcggcggtgcttcatggacgttagccaaatcgttgccgttgctgtgttcgtcgtggtcatgatcaccatcatgaccgagaagctgcaccggtcgctcgcggccatcacgggcgcgatgatcgtgttggccctgcatgtcatgccgttcgacgcggccatggagcacatcgacttcaataccctgggcgtgctgctgggcatgatgctgttcgtgtcggtagtgaagctgtcgggtgtgttcgagttccttgccatcaagtgcgcacgacttgcaaaaggcgacccttggaagatcatgctactgttcgtgctgctcacggccgtactttcagcattcctggacaacgtgaccaccgtgctgctcatcgggcccatgacgctgaccgtatgcaaactgctcgacgtcaaccccatcccgttcttcatgaccgagatactcgcgtcgaacatcggaggcaccgcaacgctcatcggcgatccgcccaacatcatgatcggctcggcagccggatactcgttcttcgacttcatcctgtacgatgcgcccgccgtggcgattatcctcgtcgcgatcctcggcgtgttctacgcgctatacggccgcaagatgaacgtggacgacgagcacaaggcccgcatcatggagctggacgagcacgcgcagatcaagaaccggcggctgctgaagcaaagcgtggtgatgaccgccctggtggtggtcgggttcatggcgcatggcgcgttggggctggaatcgtgcattatcgcgctaggcgccgcgggcatcatcatgctgatctcgggcgaaagcatcgaggaagcgctgtcgaacgtggagtggaccacgctgtcgttcttcgccggcctgttcgtcatcgtgggcgcgctggccgagaccggcgtcatcggcatgctggcgaacgggttgatcgacgcaaccggcggcaacgtgttcatcaccatgctggtgctgctcatcggctcggccgtgatctccagcttcctggacaacatcccgttcgtggccacgatgatccccatcctgctggccatggaatccaccggcatggacgtcacgccgctgtggtgggccgtgtcgctgggcgcctgcctgggcggcaacggtacgctcatcggcgccagcgccaacgtggtactgtccgacatcagcaagaagcacggatacgagatcacgttcgcgaagttcttcaagaccggcttccccatcatgctgctcaccattttgatagccggcgtatacctggtggtgcgcttccctccagcgtaagcgcacgggcgcgaggcgcaaccgacacgagcgaaaaactcgcctcaaccccttgcaggagcgcgggggttcggatatactgcttactcgcgcttcgcttagaagccgtatgccaacgtggctcagctggtagagcaacgcactcgtaatgcgtaggtcagcggttcgaatccgctcgttggctccagaaaaaatgcaggtcaggcgatgagagttgcctgacctgctttgtttccggagtttttctttcagcgccctggaaggagatgagctcatgtccaaagcgaacggcagcgaggcgctcgtcgccgaacagctctccaaagatcgcgccgtcatcgagctatgcagacgatcgctcgtcaaccatttcgtagtgcgggacatggatgccgccttagcttatatggccgacgatgttgaatggctgggtccgttcagctgtcaaaccgcctcggacaagaagaccatggaagacatcctgcgacccgagtacagcatacggctcgcattggcagacgagcgttggcgcgcccgtaaacgcgccaacacctggatcgtctcggcacgctatacgctgcttgtcgtgtcggccggcggagagcgcagcatgccgttcaagcaacatgctacctacgtatgggcccctacgccggacgggcctcgcatcgtgcatctgcacgtgtcgaacgccaccgatgcgaacccgctcttgccttcgctcgatcctggccagaacgccatcgaattcctgtacgagcacttcgatgcccagggatccggcgccggcaagctcagcttccgagacacggacggagacgttcacgtcctgcatcccaacgaactgtacgctatagaatccgacggtccacgctgcgtcatcaggcatgcgcacggaaagttcgcggtgcgaggcgccttggcaagcctggaaaaggaactgcctgcaaaggacttccttcgcttgcaccgcagttgtctggtgcatcgcgggcacatcgccagcatcgaggatcatcaggcgctgctcgacgacggctcctcctaccccatcgcggagcgacgcagccgggagatcaagcaatcgttcgaactgaccttgtagcacacctcgtcgcacgacgccgacctctcccgcgcaacatgccagagcaatctgccgaccgctgcgttcgttgcgtttgaacgggcattcgttctcaggggatcgctctttgccggcggttcgatctataatccagtggtatatggggatttcggaataggaatgttccgcaatgcgatcggaagggcggcgattcgatcatgatagacgacgaaaagctcgccgcctgtttttccgacaaaggtatggagcttgacgatggcgacctcgaccaggcgtcgggcggtattagctgccccgaccagatcgtcttcttctgcaccagatgccatgaagcgaaaacggtcacgaaaaccagcagcgcgctgatatgccccgattgcggcacgccgttcggagcctcaacttctccgaatcccgatccaacgtagggagaaccaagggacggtaccggcaatggcaagagcgacgggcattgagaagccgtatgacaagctcttccaccgatgggactcttcgaaagaggtcgttcgtttcgtttgaaggggcgttcgttccgcgcatctgaaaatcgtcctgctacccggttacaatctcgcatgcttcattatttcgaccctgccaatgaaagaggaaccgcatgtcgacgatacgcacgtttgcacgatcccatccgctgctcgtaaccgccgtcgggctcgccatcggactggccgtgatctggttcgtgccatccgacgggtctttggcgaacatgatgttcattcgcctgggattgaccatcgtcatgttcgccatcatggccgtcgcggcaggatgcaacatcatcgtgcccaacgccaaaagcatcggcctctcgttcaagaagtctatctacccgttggtcgtagcgctggtcatgggcgtgttcgttctgctcggcaccgcaatgaaaaacgaggggatggtgtccgactggcccttgcagctggcgctggtcatcatgctctgcctgcttgtgggcacgttcgaagagggcttgttccgcggcgtcgttttcagcgggctgctggctcgtttcggcgagacgcgtcgaggtctgatcggagccgtgatagtctcctcgctgatcttcggcttcgtccatgtgacgccgtccatcatgaacggccaagtggtcaccggtttggacatggcccaagcggcgctcaaaaccctgcaagccggcatcctgggcgcgtttctggcagccctgttcctgaaaacgcgtaacatctggggcatcgcgctggttcatggcctcaacgaccttttcgtgatgctgggcgacgcgcttttttccggcaccacgtccaccacgtacgtcaacaacgacgcgatgatggccagcgcatcagtcgtcatgtacggggtgttcttcctgctgtacatccccatcatcgtctcgacggtgcgcatgctcaagcaagtcgaaaccccctgcaaaggcccctttgccgataggtggtcttgagcgactttgaatccgcgcgaagccccaacggcttcgcgcgctatttttactcgcgaaaacgaccgcctatccacctaaggttcacgctctttctcgcattgatgcgctaactcggatcaccgtccttcttcgtcctccttacgcttccgctaacggaataagcgccgagcgttaccggtggtactatcgccggacgacccgaccgaaggcaaccggaggagcgcgccatgaaaccttactacgaaggctggtacatgaagcagcagcaaggcgaagacgtgctggccgtgataccggggcgcgcgcaggactccgcattcatccaggtggtctccaaccgcggctcgcacttcttgccgtaccccctggaggcgttcgaccgcaccgacggcagcatgcgaatcggcgacagcttgttcacgccgtacggaatgcagctgcgcatcgacgaaccggatttcgagttggtaggaagcgttcgctacggtcatctgctgccgctgcgctcggacatcatggggccgttcgcctacgtgcccatggaaacgaagcataccgtgttcagcatgcggcaccaggtgaccggatcgatccgcctcaacggtgacgcgctagatattcgcaacggcatcggctatatggaaggcgaccgcggccacacgtttccccgcagctatttctggatgcagtgcctcgacgttcgacaagatgcctccgtcatgctggccatcgccgaaataccgctgggtccgatccgcttcaccggctgtatcggcatagtcgcgctcggcgagacggaataccgcttcgccacgtaccggggcgtgcgcatcgtggagcatacgcccacgatggcggaagtgcggcagggcgatatgagcctgcgggtggaggtgcttgacgatcgcgggcacaagctgcaagcacccgcccagggtctgatggatcgcacgattcacgaaagcccttccgtacccgcgcgtatccgcttcgtcaagggcggcgaacctcttttggacgagatggagccccaaacaagctacgaattcgtttccccaacttcggcgtagggaccggacgccccctttgcgtgcctcgcggagccgatccccgccgcgttcgcccgcacgacgctggtatactgggcgtatcgagcaaccttcgcgagagaggatgcaccatgctgtacgacaatattatgatcccctacgacggatcggcttcgtccaaagcagcccttgcggaagcggtgcggttcgcgaaggacgaccccggactgacccttcgcatcgtccagatcatcgataccgaccagcttgccatcgacaagctggaagccgaaggacgcgacgaacagaccgtcgcttcatcggcgatgctccagaaaacctacgaagaggttaccgaagaggccagcaaggcgctgcatcgcgaaatcgaccctctgctgagcgggctcatgaacaaggtgtacatcgaactgctgcaggaaacgcaaaccggcggacagatcgtgacgtacgccatcgacaacttgtgcgacctcatcgtcatgggctcgcgaggtctgggcgcgttgcgcggcattttgggcagcgtcagcagctacgtgctgcgcaacgccgacgttccggtgctcatcgtcaaggaaggcacgaacgagtaggacgagctgtcatcccgagcgagcggcgctcgggggctgttgatggtttcttgacattctcgtgctatgctccttcgcatgcgcggcaagacgaatgcggaggagcgagaagaacgtgagcgaacagaaagcggccatcgagcggaacggcgaggccacgctgctggtggtcgacgacgagccggaaatcgtcgcgcttttggacgagtacttcacgggtttaggctaccgcgtgctcaccgccgaagacggggcaaccgcgctcaaacgcgccgagcagagccccgacctcatcgtgctggacgtgggcatgccgctcatggacggctacgccgtgtgccgccgcctacgcgagcatctcacctgccctatcctgtttctcaccgcacgcgtcgaggacgtcgacgcgctggagggctttgaagccggtgccgacgactacgtgctgaaaccgttctcgttagccgtgctgggagcgcgcgtgaaggcgcatcttgcccgcgacaaccgccagcacgtgcgcgccgaagtacgcttcgacggcgacatcgccatcgactaccgctcgcgcaccgtgacagcggccggacggccggtggagctgacgcggcgcgagttcgacatcgtcgcattcctgtcgaagcatcccggccaagtgttcgatcgcgaccgcatccacgagcgcgtgggcggttgggaaaacgagagtgattcgcaggtggtgaccgagcacatccggcgcatccgcaagaagctggccgcagcgggcgccgaacccgacccggtggaaacggtatggggcatggggtaccgatggcacgcgtaaggggcgccgagcgtttcgacgccttgcgggcgcgttggcaccacgcgtcgctcaaaacctcgttcatggtgtacatgctgggattcctgctgctggcgttggtgatgtccacggtgacggccgggatgttcagcgggttgcagcaccgggtgatcgcagacgcgtacgaaatctcggggctctacctctacgatgcgcacaaccggacgctcgttcccgcgcgcgccgtggatatcgacgagaacggcagcagcgtgttcgttcaaaccgtgcgcggcgagatgaccgagatgccgctgacagacttgtcgtcgctcgtggagatcaccgacgcgagcgattaccagtattcgccggggacggcgtatctgtacggttccgccaacgacgacgcactcagcgtcgaaacgcccgaagcgcccgaccaagccaagctcacgcccgccgagctgcccgcctatgacgcgaaagcgcgcgatcggttcgatgcctggctggctgccaaccctgacagcccctacacgtcgttcttcgacggagacagccaggacggcaacaccgtcggactgctcacttccgcagtgggttactacgtgaacacgcccccatcggaggaggcgcaggcgctgtcctcggcactcgagctgctaacgttcctcatgttcccgctgtggttcggcctatgcatcttcgcagcggcgcggcgcttcttcggcaagcgcctccaacctggattcgatgtgctcgaccgagcagcgtccaacatcgccgagcagaacctcgagttctccgtgtcgtacgatcgagacgacgagctgggccatctagcttcgtcgttcgaagccatgcgcgcctcgttggccgaatcgcagcgcgcgctgtggcgcacggccgaggagcgcaagcgcctgaacgccgcgttcgcgcacgacctgcgcacgccgctcaccatcctcaagggcaagatcgagctgctggacgcgcacgtgcagtcgggcaacgtgcccgccgagcgtctggctgcctccgtcgcctcgctggccgcgcaggtggagcgccttgagcgctacgtcgccgctatgagcgggctgcaaaagctggaagaccgcgccgtggtcgcgcgtccgaccgggttcgacagcgtggcgggcatggtggaggacgccggaacggggcttgctgcgcacgccgaccgaaccttcgcgctgtcggtgagcgcacgttgcgaccgcgagcggccagagctatgcgtggatcaggccatcgtgggcgaggtggccgagaacctgctgaacaacgccatgcgctatgcgtcgtcccaagtggacgctcgcctcgacgtgcgtgacggcgcgctggttctcatggtggaagacgacgggccgggcttttcgaacgccgcgctcgaacgcggctgcgcgcccttcttcagcgaggtgccctcggcagaacatttcggcctggggctgaacatcgcgtcgctcatgtgcgagaagcacggcggcggcgtaacgctggagaaccgcgagacgggaggcgcgcgcgtggtcgcgcgattctccctggatttctgcgccgagtagacagtcggtagatatttgctccgtaccatcggaagcgtaccgaacgcacccgagaaacggagcatcccatggaagacaccgccccgctgcgaacttcgaccgtcaccctgcccccgcttcctcgtacgcatggcaacgctcccgataacgcgacgatcgcgacggaccggcgttccctgctgaagaagcgcgctgccgtgatcgtcgggctgctggccctgacggcggggctcgcagggttctgcgtcctctacgggccggagctgcttgccttcgttgccgacgctccgcgcttccgcgcctgggtggacgaaaccggctggatcagccgcatcgtgttcgtgctggccaacatggcgcaggtcgtgttcgcgttcctgcccggcgaaccgcttgagctgggagcgggctacgcgttcggcttctgggaaggcacgctgtggtgcctcgtggccagcgccttgggaaccgcggcggtcatggcgctcgtccgcgcattcggaatccgcatcgtcggcttgttcttctcgcccgacaagatcacgtcgatgcgctggctgcgcgactcccgacgtttcgaaatgctgctgttcctgtgctttctcattcccgggacgccgaaagacctgctcacctatgtggccggactgggatctagctccatcggacgcatcgtggccatcaccacggtaggtcgcatcccctccatcgtctcgtccacgctggcggcgggcgcgttcggcgacggcaattacctgggggcggcgctcgtgatcgcactgacggcggtgctggccgcggcgggcgtgatagcgtaccggcagctgacgaagcgcagcgacgcggccgaggatgcggcctctagcgctgacgcaatgggagcctaggcgcgcgccgagcgccactccgtcacgggatcgtgctccggcggtgacctgggcgcatcccgtttcgatccgcacgcgcgtaagatgaaccatcgtagcgcggaaaccggatcgaagggaggcgtcgtgagcatcgggtacgcatcgaagacgctggcagtgcccggcgcgcgcatgcaatcggtggtgcagcggctggcgacgcccgaccgcctggcgcaggtgatcgacggcaacctgtgcgcgctggacgccgccctcgactaccaggcgaaaaacggcatccgtctgttccgcatcagctcggacgtgatccccttcgggtcgagccccgtgaacgcgctcgattggatgcgcgacttcgagccgcatctggccgcgctcgggcgcaaggcgcggcgccatggcatccggctgagcatgcaccccggccagtacaccgtgttgaactcgcccgatgccgacgtggtggagcgggcgaagctcgacctggcgtaccacgcggcgttcctcgacgcactcgggatggatgcgagcggaaagatcgtgctgcacgtgggcggcgcgtacggcgacaagccgcgcgcgctcgagcggttcgccaacgcgtacgcgacgctgcccctcgcggtgcgccgacggctcgtcatcgagaacgacgaccggctgttcaccgcccaggacgtgttggcgctcagccgtgcaaccggagcgcccatggtgttcgacacgctgcatcacgagctgaaccgcgagtccgacgcgccggactggcgggtgctgctggacgaggcggccgccacctggaagcccgaggacggcgcgcagaagattcactacgcgcagcaagcccctggtcgcaggccgggcagtcacaccgacaccatcgagcttgcgccttttctcgcgttctaccgctcgcttgcagagcatcgggccgacagcgccttcgctatgcccgacatcatgctggaggtgaaggataagaacctctccgccatcaaatgcatcctctgcaccagcgagcatggccgcttcggccagctcgaacgcgaatgggcgcgctacaagtacgccgtgctcgaacacgaccaggcagcctacctcgccctgcgggcgctgctcaaggacaagcgcacgtggccggccgtgccgttctacgagataacggaacgcgcgctggccacgcccgcggaacagggatcgtttcgcaacgccgcgcagcatgtgtggggctacgtggcgccgcacgccgccctgcgcgagcgtgcagcgttcgagcgccttctggagcgcgacgatcgccacgccgtgaagcgcaagctgcacgccctcgccgagaagtacgaccagccctatttgctagagtcctactacttcgtgctgtagccttcttgcgcccggctcgagcgcggatgtttcacatgaaacatcggacgacgcccttcgtcgtgccctgacggcgaatgcaaggccctgtcctttccgccgtcgcagcgaaaaagggcgcttgagcgcttcgctcgcttgggcaaacaccgctgagagggctcttttcttacgtgtagttattgagaatagttctcaataataatggtttcgttacactgcaaccatgataaacggagtatcatatcgggcagagagaagacctgaaccaccgccgattccatcggcgccacgaacacgaaagagagggatcgtatgcccagtttccccaatccgtttgcaggcaacgttgaccgcaagatgacgaacgccgaactcatgcaggcgctccgcatcgacatcgcgggcgagcttgaagccatcttcctgtacgacgcccactatcaggcaaccgacgacccggccgccaaggccgtgctggccgacatccgcgacgaggagaaggcccacatgggcgagctcatcacgctgatgcgccacctcgaccccacggagacggagttcttcctggaaggcgaaggcgaagtgcaggagaagctggccgagctgggcatcaagaccgacggcgaaatcgccccggcgcccgcggagcccgctcccgcccccaccgtcggcgacctttcctaacgcaaccgacttccagcgcgcagccgccgaatgtttcacgtgaaacattcgtacgtgctgccgccttctcaagaaaggagtccctcatggactatctcgctcgcgaatcggccgacctttcggacggcctgtggaaccgcatcgacgaaaccgttatcggcaccgcccgcaaccagctgacctgccgccgattcctcaaggtgttcggcccgctgggcgccggtgtgaccaccgtggccgtcgacggcgtgaacaaggaagaggtgcttgaggacggcatcggccgcatcgtcggccgcacgcagcttgaactgccgttgttctacgaggacttcaccctgctcagccgcgacatggagtacgccgcccagaccggctacccgctggatctgtccgtggccatcgccgccgccaagaaggcgtcgcgccgcgaggacgacctcatcctcaacggcagcaaggcgctgggcaccgacggcctgctcacggtgaagggatcgtcaaaaatcaagaagagcgactggtcgcagggcgagaacagctttgccgacatcaccgccggcgtcgcccagctggccaagaccggctacctgggccgctacgccctcgtggtgtcgcccgacctgttcctcgacctgcagcgcttgcagccgaacaccggcctgcttgagatcgaccgcatcaagaagctcatcggcgacaacgtgtacatgaccagcgtcatgggtcccggcaaggccgtgctcgtgtgcgccgagcccgagtacctggatcttgccatcggcctggacctgtcggttggctacctggagctcgcggacttcaaccatacgttccgcatcatggaaacggccgccctccgcgtgaaggaccccgccgccatcgtggtcttcgcgtaagcgcggcgcacccgcaacccgcaccgcacaaggagccggcaatcgcgccggctcctttttcatgcaagatcctcgataccgaacgcctctttgccgccgtcgctcagcttgaacttgagcgggcgcagggataccgcttcgacgaagtttgcccgctcgagctcgagcgcgtacttgcgagcgctctggggcgtgacttccagataacccgcgacgtcacggagggtcacttcggggctcgacccgaaaagcgcgacctgcaccatctgatacagcacaccgcaggcgcgatccgacagcgctccgcaaagccgaatctcatcgagataactctccgccgtcgccaacgcatcgcggcgcgttcccaattctgcgacaagctcttcttgcgcgattcgcaccaagtccatcatctggagcacgaagaaagtagcctcgccgtggttgagcggatcttctgtcaccgaaaaggccttgtagtacgctcctttgtgctcggctatgacacggcagagcgacagcgtggtgggcagtgacaagggattgctcaggtagagggcaagcaggaaccgtcccgttcttccgttgccatcgtagaacggatggatgtactcgaacaggtaatgggacagcagcgcgctgtacacttcaggcatgtcttcagacgacacgaggtcgatcatcttgtcgagatacgacacgatggcgtcctccggctcgaccccccgatgaaccacgcgatcggttggcgccttgatatcgacgccgaatttgcggaacagctggccgtcgggagcgtcccccgttttcagcgtgccggcgacgaccgcgtcgtacagcgcgcggatgtccgcaggagtttcgggcagggcgacatcgccgctagtaagaccaaggtacaggttcgcgaactcgatgaactgcttcgtccgacgatcttctccgtcgccctcctcgatgccttcaagcgcctcctcgatctgcttgcgcgtgctttgaacgccttccatttcgtttgtgcataccacctcgtcgacgatgaggttgcgtacgtacgcgccgcatgcgatgcccggcaggtcgcgccatagctgcgagaccttgcgctcggcgcggagaattttctcggtggcgatcgaaagctcgcgaggcacggcgaggaacagctcgccggtgcccacgtcgatcccggtgcgaaacgacgaaggagccgtcaggcgcgtctgcgcttcgtgctcgttctcgctcttgcgattgctcgatgtattttcgtgaaacaatctgtcgagccttttgtaagacaaggtgcaccctcctccgtctctaatcacgaaatctgatgacttttcatgattataacgtcaaaaggtacattctaatcgtgaaaatatctcatttttcacgattatagatgcttcgtcttctttctatgtactaaaagttgctgcttttcacgattacagcttctcctcgttcttttgccggtggcggataacgaggttgcgccacacgacgtaggcgccgaggacgaacgcgcccacatagcccagcacgcccagcaggggcacgcccaggaactgcgggtgcatgttcgtggtggcaagcaggctcgatccgatgaacaacccggcggagatgagcgccatagccaccgtcccgctgacggagtagagcgcagcgatggcatccagcggaatgcccagatcggcgccgacgcgcacctggccgcgatcgatcatgtcgagcgtgtgcgatgcctgggtgggcaagcgcaccgcggcctgcgcggacgtcgccgcggtcgagacgaactcgcgcgccttggtttcgaacgcctcccaggtgcgctcgcggcgcttcacgtgggcggcgatgatgtcgatgacgctggtgtcgggcgcgatgtccaccagcacgccctcgatggtgaccatgccgcgcgccagcagggtgaacgagggcggcagcgccaggttctgcgtctgcagcacgccgaacacgtccatcagcgccgaacccacgttgatatcggccaggttcaccgtggtgtacgagaccagcaggttgcccagctggctgagcagccgcccatggttgaccgacccctccgtgcgcacggcgcccagcagcgcctccatcagcgcatacgggtcgttctcggctacggcgcgaaacatgcgcccgatcagcgcgcgctcgagcgccgacagctggcccaccatccccaaatcgatccacacgatgtcgtcgccgcgcacgaggatgttgcccggatgcgggtcggcatggaagaacccgttgtccacgatctgcgtcacgaagctctcggccaggcgctggcccagcttcgccggatcaaggcccatcgcgcgcagggcgggaacatcgttgatcatagggccttcgacgaagtccatgaccagcacgtcgtcggaactgagatgcgggtacgggcgcgggctttccacccccggctgatcgccgaggaactggcgaaagcgcacgaggttgtgctgctcgacgcagaagtcaagctcctggcgcgtcgtgcgctccagctcggtgaccaggtcgtccaacgacagcttgatgccgtcggttgcacgggtgagccctacgagcgcaaccgcctggcggatgagggcgaggtcctgcgtcatctgctccaccacgtgcggtcgacgcaccttgatagccacgtacgaccccgccttcggagcgtcggcaggcaacggagacgctgccgcgccgatgcccgtttccgcatccccaaccgcatgcggcgcgatgcgcgcccggtgcacttgggcgatggacgccgatccgagcggcttctcctcgatgcacgagaacgtttcccgccacggatgccccagcgattcctcgatggtggcgagcaccgtggagaacggcatgggcggcacgcaggcgcgcagccgcttgaacgcgtcggcgtacgcgggcgggatgacgtcgctgcggttcgccgcgatctgccccatcttcacgaacgtcggccccaggtcctcaagcaagctggtcgccttttccggcgtgaggcccgacagcacgcgatgctgccgcaggatgcgctcgatctcgcgcaggcgcctccccgaccccgaccctttatcgcgtcgtgcctccacggccacctgcgccacttccttgagcgtggccacgccgcacctcctcgtctcgcctgttcgaccttcattcgacagcccagcgtaccatggcaccatgcggcgagcgcaccggttgcccagcggttatcggatggatgccgagccggaggaagaagggcggaaacgcacgccgccccggtctgcgcagaccggggcggttgaagggggcgcgacgcggagggaggggagagaacgcgtgcgccccgtcggattggatgatcggtcgagcggccggcatgcgggcgattccgcatgccgagccgacggcagtgcgccttacgcgtcgatcgtctcgacggcgtactgcccggccaggcggccgccgcagtaggcgcacatgagcgagtagccttcgtagtcgcagtacggggcgctcatcagcgtgccgttgtcggcgccggccacgtacaggccggggatggccacgccctcgccgtcgatagcctgcagacggtcgttcgtgcggatgccgccgatggtcacccatgcgctgggctcgtactggaacgcgtagaacgggccggtggtcacgggctgcaggaagcaagccggcttgtagaactgttcgtctttgccgtcggcgcagtagccgttgtactcgtccagcgtctcgaccagctcgggcgcatcgatggcctgggccagcgcctcgatggtgtcggccttgaaagcccagccggcgctcacggcatcatcgatgctgccttgcacgttctccagcggcttgtccttgagcgtcatcatgccggtgcgccagttcacctcgtcggcgccgcacagcgtccacgcgtccttgccggaattcaagccgtccacgtacgcctggtcgaccaccgcgtagtatttgccgccgaccagcgagatggccccgcccagcgccagcggcaggttcgcgaacttgccctcgttcgagaagcggcggccctggttgttcaccagcagcgtgccgtagatgccgatggtgaacgcggcgctcttgcggtcgtacaggccgtcggccttctggttggagccggtgaactcgttgcccgcgatgccccattgcgtggacagctggccgcccgcggcctgcaccatgtcgatgccctcgcccacggacagcacgttgcccagcgggttcacgaaggtgccgaacttctcgcgcatcatgtcgacgttgcccaggaagccgcccgtggccacgatgacggccttcgccttcacgtcggtcacaccgtctccctcgcactgcacgcccgtgcacgcgccgtcttccatgatgaggcgcttgcccgccgtgttgaacaggaactcgccccccttgctttccacgaactcttggaggggcttcatgcgatcctcgcccttggcctgcgtcttcgagtccttcgggtcgctctggaagttggcgcgcacggacgcatgccctgcgccgtagttgtcgggacgcaggccggtaggcacgccgaagtcgtcggtgaactggtcgaccgtctcgccggagatggcgacggctgccttgacggccgcagcgttcgtggaccagtgcgcgtactccataatatggttgaaggcttcctccaccgtgaactcgacgccggcttcctgctgcagcttcgagcccaccatgaacgggccgcccgccagcgagccgttggccacgcccacgttaccgcccttctcgatgacgacgacgctcttgccggcgcgcacggcttcgaccgcggcccacatgcccgcgccgcccgcgcccacgatggcgatgtcgcattccttcgtctgatcggcggtctgcatcgcggaagctgcgtcgtcggtcgcgcccttcgcgtcggcgttcgcgctgcttgacgcttgcggggcgcatccggcaagcgcggccgcgccgcccagcgccgcaacgccgcccagcgtgaggaagctgcgacgagaaagcccgttctttaaagtagccatgtgaggtccctcctaaaggattccctgtgcgctcgaccgttccgatcgagcggcgcgccctcccgaggcgctgaggaaagcatgcctcgcatcaggcggtttgtcgcgggtgaagtcgcgcgccgaggggtgaatccgcgttcacccctgcgctcacccctggtacaatgacacgacgaacaggaggttcccatgaaatcaagcgacgtggtgcgcgcgctggcgcccgcagatcaggccggcgaggacgagcctctgtcggcgctcatgtacccgctgcgcttcttggggatgggcctgctcatcgcctggctgtgctgcacgcacgtcgcctccatcttcccgggcgacgtgttcgaccccgcgctgcgctcggcattcgacacgggcatgcgcatcggcgacatcggcacattcctcgcgttcgttctattcgcgccgcgcatcgggcggctgagcaggcacaaggcgttctcgtgggcagcggtcgcccttacgacggctggcacggcggcggtgggcctcgcgctcattcccggcggggtcggcgaggcggtcatcatacctgccagcatcgtcaccgccataggcggcgctgtgctgttctgcctgtgggccgaagcgtacagccagatgggagccacgcgcacgctcatgtacggcgcgctgtcctgcatcgcggcagccgcggcgtcgttcctcatctccacgatggaggcgccgttcggcgttatcgccaccgcactgctgcccctcgcatcgctggcatgcgcgcacctgagctttcgcctgttgccaaccgagcgcgccgtggcgaaaggggtgcactaccccattccgtggaagctcatcgtgatcatggccattgcaggcttgctgtccagcttctcaggcgcgttcctctcggccacggaatacgtcggcgccatccatcgcgtcgcggccaccggcatcgtgggcgtcgtgattctcgtgatggccgtttcgaagcgcgaccgcttcgacgcgcgtttcctggcgaaggtgggactgccggttgccgtcgtcgcattcgccgtcatccccttcgtcgcccccatgcagggctacatcgtgtcggtgctcatgcggttcgcttacgtatggttcacgttcttcgtgctgctcatgctggcgaacatctgctaccgcttcgagattcccagcctgcggctgttcgccatcgcgcgcgcgtcaagcgaggctgcgctgctggcaggcatcctggtgcgacgcgccctgtggcagaccgacctgctggcggatccgacgacgctcgcggggttcgccttggccggcatcgtcttggtgctggtgtgcgtggtcatctggatgagcgagaagtccgtgaacggcgactggagcgcgtcgggcctgtcgctggccgaccggctgcacgtgccgggaccgcgcgagcgcttcatgagccgctgcgacgacctggccgcgcagtacgacctgaccgcccgcgaaaccgagatcatggggctgatagcccagcggaagagccgcgccgagatcgagcaggagctgttcctgtcgcagaacacggtgaagacgcacgtgcggcacctgtacgccaagctgggcgtgcactcgaaaaccgacgtcatcgcgctgttcgaagagtgagggcgccgctctgcgagcccatcttcgcccgaaaaacacgccacagagggctaatgcgtgtttttcgggcgaagatgtttcccggcgaggtcgcagttgcaagccgcgcccatgctatgatgctgcactatggcacgcatcgtgaaacatagcgagcatcctctttggatgtacaaggccttcctcctggtggcggctgccatctggggattgggcaccgtggtcatcaagtcgaccgtcgacgagttcccgcccgcatggctcgtcggcgtgcgcttcaccgtggcgggcatcattttgggcatcgtcatgttgccgcggttcagaaaagcgctggacctcgaccacctgaaaaagggcgccatcctgggcgcgttcctgttcctctcgtactgggcgaactccacgggactcaccgacaccaccgcctcgaacagcgcgttcctcacatcgctgtactgcgtgatcatcccgtttctcggatgggcgctgcgcgggccgcgcccgactcgcttcaacatcgccgccgccctcgtgtgcgtggccggcgtgggctgcgtctcgttcgcggggctctcggggttctcgctgcgcttcggcgacctgatcacgctgctgtcggcgttctttctcagcctgcatgtgctgtacacggcgaagtacgcgcgcggtcgcgacatgacgctgctcacggtcgtgcagttcctggtggccggcgttctgggcttcggcgccgggcttgcgttcgagcccatgcccgcgttcgccagcttggggctggacacgtgggtgagcctggggtacttggccgtgttcgcctcgtgcatcgcgctgctgctgcagaacttcgccgtcgcgcacgtcgaccccgcgcccgcatcgctgttcctggcaaccgagtcggtgttcggcgtgacgttctcggtgctgttcttgggcgagatcctcaccggcccgctgttcgccgggttcgccctcatcttcgccggcatcgtgatcagcgaatacctccccttgcgcgcagagaagaaacgccgagcgcgcgcgatgaaaccgcaggaagcggaaaccttcccgttcgaagacgaccccgagcgggaagcatagcctttccacctctccgccgccgatcaccttgccaagccccatcccgatgtttcacgtgaagcatcgggcgcttcgagatgccgctatctggcggcgcaggaaacgcgctagattgagcagcaaagcacgcaagaaccgcgctggatccaagggcaacccgcatggaattcgcgtgagaactgggtcagattagcgctagattgagaaagattcgcgctagacgtgcgccatctgcgcgtaagacgaggtcgttatactagggacacggccttgttgggcggagaggatagcaccctctttacatccatttccgattctagataacggaagggggtgtcctctatggatggattggtgttcgaccttaccggagttatcttgcaggttctctgcttgctcgctgctctctgcaacttgggagtggaggcggctgcgcttgttctgcaagttcagtcgaaagataaaccccggtcgccccaaggggacgaaccgggacccaaataaatccgaaccgccgaagcaagtccgagggccgtggggagtaaccagctccctgcggctcgcctgcattatacgcgacacgccccgtagcttcaaccgattaccgtgatgagataactcaccctatcgtggcgagatggtttcctttagaatggggcgacgcgctcgacaaggacgacgcacattcgcctcatcacccaggacgccttatgaaacacgccgcacccgccgaccagacgcccgctcctgcaagctcgcctgaaaccaccgcccgacggcgtttctcggcgcccaagatcatcggtatcgtcgcgggctccattgtgggcctgctgctgatcgcctacgtggccggcagcctttacttcaccgaccgcttcatgccgaacaccgtgctgggggaccacgacgtgtcgctgaaaacgtcgtccgaagtgcaagccatcctcgacgacgccttgagcgattacaccgtggcagtttcggggcagggcttctcgatgaagctctccgcgaaagatgcgggcgtctcattcgacgggcaagccatcgtcgccgacgcgctgggcaacacgaacccctggctgtggccgctcgaaatcacgcgcgagcacgacgaaaccgacagcttggctgcctccagcgggagcagcctcgcgaacgcggtgcgcaccgccgtcgacgagttcaacgccacggccaccccgccgacggacgcggtcgtcgcattcgacgagcagaagaacgcgttcgccgtgcagcccgaggcgaccggcaccgccctcgacgccgatgcagtggccaaagccatcggctccgccatcgcctcgatgcagcccacggccaagctgaccgccgacgcgctgcagcagcccgccgtgcccgccaccgacccgaaactccaagccgctgccgaagctgcgaaccagctagtcaaagccgatatgcagctgatgatgggcggcgacgtggccgcggaggtcaacccggccctcgtctccacctggatcagcttcgacgagagtcttacgccctccctcgacgaggaggcgctcgtcgcctgggcgaaacagctcgaagtcgcatgcgacaccgtgggaaccgagcgcacctacacgcgccccgacggcaaggtgatcaccgtggcgggcggcccgtacggctggctgaccgacggcgaagcgctgctcgaactcgtgaaggaaggcgtggcgaacggaaccgtcggcgcagtggacatcccctgcaaaaccaccggcaccgcgtacaacggcgcaggcgcgcaggactggtcggcgcgctactgcgacatcgacctctccgagcagcacgtgcgcttctacgatgaaaccggcacgctgatctgggaagccccctgcgtcagcggcacgccgaacggcgcgcacaacacccccacgggcgtgttctggctcaaccagaaagcaagcccgtcggtgctgaaaggcacgaacctcgacggctcgaagtacgaatccgctgtgcgctactggatgccgttcgtcggcaacgtcatcggcctgcacgacgccgactggcaagccgcgttcggcggcacattgtaccagcagggccgcggcagccacggctgcgtgaacctccccgtcggatcggccgccgacctcttcggcatcatccagtccggcgacgtcgtggtctgccactggtaagggcgaacgcggaatgtcgaaaacgaagccggttctgcaagtttttcgactctgtggcacgcgtgacaatgagcgaccaggggtttctcatcagcgcttcggcgcgcttcgtcatcccgttttgccgcaaaagcaaaatgcctggtgagggcttcggtctttcgtgggaacttgccacaaagtcgaaaaacttgcagaaccggctcggaaaccgactggccggcttcgacacagatgcttgatggcggatcgccgcccgccgctcgacgcgcgttcaccgtcgctcgatgggcggatcgccgccactagctattccgcagctcgcccatcagcccgatcgctccgcaacgaaacagccccgcctaccggagaagggggggggttccggtaggcggggcttgggcacagcgctcccgagcgaagagggagagggagcgcttacctctcgaaaatgtctgatccttgcatgcgaaggcgcatggtgtccaccatctgttgggcggtgcccaactcgaccggtcgcggcgtcatggcatagcgatgcaccgcgccttcaagcaagtacgcagggcgaacctcgtcgagcagctcgatggcgttctcgggacatacgtcgcgacagctgccgcacttcacgcattcgccgggatagtggtagacgcccagcgttccatcgtcgttgtcgaatttgcggatggcgcccgtcgggcagaacgtcgcgcacatgcggcacgacgagcacgcacgaccgtcgatcaccacgcaaccccacaggcgcgtcgcaacgctgggcagtacgggctggcccagctgcgccagattgtccaacagcgcctcgcgccgatcgggaacgaaatggggcaacgtgccgtccttcgtaacgcgcggaagcgcagcgggagccgcagccgcaggaacagccgacgaaaccgccatgtgctcgttgccgcggcgctcagcgaagtacgccgccacggcagccgctgccccatcagggccaacgccctcgacacaggcgccggcaggcacgccttcgaccacctgcacccgagcatcgcttccccaggcttcgaacagggcgttggacgttgcggccaccaggcgcgccgtggcaacgccgtgctcctgctcgcaacgcgagcagtcgccgcatgcaagccggatccggcgtacgccttcaaccgcaagcccgctggtcagcgactcgtccacacgtcccaagcacaccacgttcgccacatggccttcgtcgagcaacccgcccgccgcacgccgcagctgctcgcacgccaccaccacttcgtcgccaacccgcgcgcccaggcacgcttgcgcaagctgcgcatcgctggggttgcgcgcttccagcgcgctcgtggggcacacagtcgcgcacgtgccgcatccgatgcacttcgccgcgtccacccgcagctcgccgtccaccagcgcgatacagcccgacgtgcatgcgtcggcgcacttcaagcacgcgacgttgcggttgcgcactttcgcgcaccgctcccggtgcaccacgatggcctcgctggacaccccgtccagcacgcctacgatacttcggttcgaccgcgatcgctcgctcgcgcgcccgtccatcactcggccgtcttctcgtcgatgtcggccagcacgaccgtgcttgcctgaggccccgcacccttcttcaccaaaaacggcatgctgaccgccttcgccggacacgcgtccacacaggctcggcatcgcgtgcagtcggccagagtgcgctcgccgaaatcgggatgccgcaggttgatatcggcctcgcacgcgatggcgcacttgctgcacgctgcgccgttcaccgtctccaggcacttcgactcgtcgatgaccggccgccacgtcttgctgaagcgcgacacgaggttcatcagccccgccatcgggcagaaccgcgtgcaccacttgcgcaagaacaccagctccaccactagcaacagcgggatgagcaccaccgaccacgtcatatcgcccgccgcgaacaggcgccacaccaccagcacggtggcgaacgtcagcccgatggggcacaccaggcagaacacgggaaagccgaagacggccgtggacagcagcgcgccgcccaacacgtagtggcgcgaatccagcttcgcacgcacccccttgcacgacgagcagctcccgcaatcgtgagagtacgcgccgtcggccgctgtcggagatccttcgactcgcttcgctcgctcaggggatgccgccgcctcgcccagctcgctcttcgcgatgcccagcatctccgagcgcttcgcctgctcaagcgccgtgcgcttcttgggcgagcggaagaacccgcgcacgcggtcgagcagcggcacggggcagacccacccgcagaacgcgcggcccaccgccagcacgagcaccgccatgatgacgatggacaccaccgcgcgcggcaccacggtcttggtggcgatcatggtggccagcgcccccagcgggcacaacgccgagaacgtctcccagccgaagcccgaaagcgtacccatgctcacgcccgcgatcagcccgacggacagcacgacgaagatcgcggccgccacgatggtgcgcagcttgttcgagttcattgccgcctcctattccgccgactcgatcggcttgacgacgatggcgcgctcctgcgcgcccgacacgatggaccccgccttcagcgatacgcacacactctcgcatgcgccgcacccgttgcacttgtcagccagcacggacacgtgcgggttggcgccctcgcccgtcagctctatggcctcgtaggggcacgcgtcgtagcagtaacggcaccccgtgtcgcggaatgcaaggcactgcgcctcgtcgatcacggccaaacccaaaagcgtgttctccgccgtagcgtctgcgggcagcgccagcgcctcggtggggcacaccttcacgcacaacggctccccgccgttctcgtcggcgcagtagtcgcagaaatcggcgtcgaacttcagcgcgggcgagcgcatgcccagcagcccgtcctcgatatgcgcaggcacgatgacgccgcgcgggcacgcctcgtagcacttctcgcatcggatgcacgccgacacgaggcgcgcctcgtcctgccctcccggcgggcgcaccaacgggttatgccccgcatagcgcagcgcccccaatcccagcagcgccgccgtgcttcccgcgccgatgagcagcgcgcgccgcgacacgtccaacggccccttcgccctcttcgacgaaatctcgtcctcttcgctcatgtctcctcctttgcccactggtccttatcagtcagcgaggtttgctgtggtgccgcatatcggcgcgtcgcacggccgagcgtgcttcgcacgagaggggcacgtgcgaaagcgtcgagatggggtgccacagcagaccgcagcgtcggccctttcgtcgttcgacagaacgacgaaaggcagatgacggggcttccctgccttgcgagaagcggagctgtgccattcgagaagccccgtccatcacatctgtttaagagcaccggccgcgctgagcggcgcaaccggttcggacgctcggaccaagatcgaccagaatctcggcccgagcgcgcccttccgtctcctagtacaaagcgaagatgctgatagccaccacgtacaggatcacgcgccagcacaatccgcccacggcgacgcacgccagggcgacgcccgcgtacgcggccagcttcttgccggtttccaccttcttcgcaagccacgtcagcaccagcggagcaaccaggccgacggccaccgtgcccagccagaacatcacggcattggcaccggcgaagatgctgcccacgatggacgcgcggtccaccatggccacgtcgggcagcgtcggatcgaagtagtactggatgtcggccgagtacagcccggccgagccgttgatgatgaacgcgtaggtgaacacggcgatcagctgcagcgcgccgccggccaaggccaccttcacgcccaggtccttcgcgctgtcatcgttcgtcaaaccggcgatgaccagcgccgtcaagccgcccatgaacacggtgttcgccaagtagtacaccggcagcagcggggtgttccacgacggcagtgatgccatgaggtagctcatgcccgtgatcaccggcagcgccaggcccacgacgatggccagcacaccgcaccatttcggcgccatgccgtcttcggcgcggcgcatcatcaggaagtacagcaccagcaccaccgcgaacacgatgcagccgatgaactccagcgtgatacccgaggtgatgtggccgaagccgttgaagatgcgctcccaatgctgcaggtgcatgaacaccgacagcccgccgaccaccaacgccgccagcgcggtgaccagcgatgcaagctgcatcttcttgcccttgcccatgacgttcagcaggccttgcgcgcccagcgcgccgcctgcgacgcataggaagaaggtgaagagaataaggggccattcaggatgcatagtctactccctccactttcggccctcgcgcatgaggtacatgagcttcggctcgttgcccacatccgcaagatggtggatatcgttttcggtgtacggctcgacgtagtccttcagcttcacgcgcgtctgggtcatctcctcgtactggcagccggggctgtcgggatgcgccggcccctcgaagttgtcgacgccctgatcgaggtcgccgaagaagcgggcgcgggcgccgcactgggccacgcactggggaagctcgccctgcgagatacgctgctcgcacagcgtgcatttctccacgacgcgctcttcctgattgaggtagcgcacgccgtacgggcacgccatcgcgcagaactggcagccgatgcacttcgacttgtcgatttgcaccgtgccgtcgtcgcggatgtgggacgcttccgtggggcacaccttcacgcattcggggttctcgcagtgctggcactggacgggaaggaagtacatctcgacgtccgggaacgtgcccgagccgccctcgatgggatgcgggccgacgcgcagcgtcttgatccagaacgatcccacgtcgacgccgttgatggccttgcacgcaaccgcgcacgcaaggcagccggtgcaacggttcaagtcggtaatgatcgcgtagtttgccatgtggtgaacctccttcctttacttcgatttcgaataagcgcccagcgcgtcgccgcccacgctgcccacggcaagcttgccgccggagagcaggtcggggctttggacgctcggctggcagccgaccgccgccatgttcgcgaacgtgagctccaccttggaatcctccaggcgcggatcgttcgccaaccattccttgaggcgcggatcgtttgcgttcgtgatgaccggattgccttgcgggtcgcacggaaccgggttgccatgcggcgagttctcgggcgtcgcggggtacacgagcaccggcacgccgcgcagctgggacgcgccgcaaatccaacactgcgcgtacttgtccatcgtgcagttgatgttcaccagctcgaagccgtgcgaagcggtgtcgatctcgggataccaccaggcgtggttcgcgttgaccgtgccctccttgatgccgtagtacaagtccacgacctcgcggatggcgccccacgggctgcggatccaaatccactgcccctgctccaaccccaggcgcgctgcgtcgttggggttcatctccaaacgagggctgggccacagctcgcggcaccacggcagctggcgatgctcggagtggaagtacaccggctggcgggagcccgtcgtcatgatgaacgcgctgtccggatgcgccgtcagcgcctccttgtactcctccaccagatgatcgccctggtagttgtcgttgatgtaggcgtccgacgtcttgatctggtcgaccagcgaggcgtcgaagtactcgggattcgatacgcgcgagttcttcggctccacccagtgcgggaacttgtcgatgtcggggatgttcggatccaccgtgttcgtgctggcgaaggtggccgcgccgtcggggatgtacgtttcggcgatggtggaccacacctccaccttggcggtgggggtcatgaagccgcacttctcgtcgatggccgcgtacaggttgtagccaccctgctggcgacggtagcccatctcccaacggcggtacgtgccccaacgctcggggtgccacttgcggcagtcgaaccagccttcttcctggaacttcgccgcgtactgcgggaagtcggggccgtcggggaactcctcggtcttccaccagtcggtggcgtccttgagcacgcggtactcctgctcctcgtaaccgacgctaccgcccatctgcacgaagtcgcggtagtccaggttgttccattcgtcgtattcggggtcgcggttgttccacaccacgcccatggccttgtacaggcagatgacggcaaccgggtcgtagatgcaatcgcccatcggctccacgcagcgctgcccggcgccgaagatgccgcccgcgccctgcgacacgcggcccgtgttcacttcaagccagtgcagcacggggatcacgatgtcggcgcagccgttgttcgggcaggaccacaggttgaagtccagccagaagtccagacgggtgagcgcctcccaagcctccagcaggttggactcgttcatgaagtcgcccgacatgcacacgccgccgtggatctggtacggcgtgtcgatgccgttgatggagtcccagatggcagcggagtcggcccatcggttccagtagcgcagcagcgggaagcgctcggcggaaatctgcttctcgttgctgtcgaacgacgtcttgagcgccggccacgagcggctgggcttgtaggcgccgcccttacgctcggcgatccagcgcgcctcttcggcggtgggaaccttgttgccgtagcgctcggccaagggcgatttctcgtcgatgaggtactgcacgaagttctggatcagcgggatctggtcttccacggacaggtcgcgcggggtgttgcccagctccatggtgcccacgtccaagccccagtccttcggctcatggtcggtcaccagcatgttggcgcggccgcagcagccgtccacctgggccttcgacgaaccgcggttgccggcgggctcgtcggagttgccggtgatgcaggcgatcagctgcagcgcgcgggtgttctgcaccgcgtggcccgtctggtcgggagcaagctggtagtggatgccgccgttgccgtgcagcgggttcaggcgcgtcgtgtagatgcgcacgccctcctcgatcttgtcgaccggcacctcggtgacctcggacacgtactccagcgtgtactgctccaggctgtcggagaacgcctcccacaccgtgtcggcgctgatggtggagccgtccttcagcttcacctccacgccgccggggaacagcgccgggttcttgggcagcccggccgggttcgagcgcttgccgccctcgttgccctcgtcccagtaggcgtcgtactgcacgtcggccggattggcgaacttggaggggtcgggcagccaggcgtccgcgatgatgggcttgtacggatgctcgatccaggtgcccgtcgtcgggatcttgtgcttctcgccctcccactggcaggcctcggcatcccagtacgtaggcttgttgttgttctcgtcccagcagatgaagcgctggtagcggccctcgtagtcccagtactggccgatccactcggggtcgcagtcggcctcggtcaggatgcggctctccatgtcgatgccgccgttcatttccatgaaccaacccttcgccgtgcggccgtccttctcggggttccacaagaacggggcgttcgtccaacggcgcacgaacgcgtcgtcgtacgcctcgttgtcgaggatccacttgagccaacccagcgacaggcacaggtcggtgcccacgcgcagcggcagccacacgtcggcttccttgcccagcggcgtcatgcggggatccaccaggatgtgcttgtaggcgcgctgcgagcagtccaccaccgtacggttcgtggagtcgtagttcgagtactccgacgcggtgccccactgcacgtacaccagagggccctgctccacctccatccacggcgagccgatctcgtcggtgaggatgccgccgaagtggcgcgggcccttgcagatctcgtaggccaggtgcgcgttcggcgtggggaagatggacttcagcgtgccgtacggcggctgcgcccacacacgcgaggtgccgcccatggcgaagttggcttccccgccgtacttctccacgatctcgttgaacttggcacccgcctcgtcgaacgcctcggcaagcgtgatgcgcacccaaccggggtcgtcctcgcctttggggttcgtgcgcttcatgcagtagcgcagacgatcgggatggtacagagccagcatggacgactgcgacttcgcgcagcagtgaccgcggctgtgagcgttggactcgtcgccctcgactttgatgaccttgttgtcctgaacggtcacccacacgccgcactccaccttgccgcacgcgcggcagcaggagcggatgcgcttgatctcgcccgctgaggcgtcttcaccttcggccaacgccgtcgaaggcgttgctgcgaagcccaccgtggttgccgcggcagccatggcagaggccttcaagaagcttcgacgactcagtgataggttcgccatgtgcccctcctctcttccttttctcgcttcgttcatctctgccggaacccggcgcgaccatacgccggaaccggtttccccattctaggaacggagcaaaagcccaaatcataaggggtggatggatgaaacgcgccgatatcatccccaaaggattattttgctttttgcgcccaacctatacttgatggcagcgaagaggttgccgttcgcgcccgtcatccgagcgtgcggcaacgggaagaaacctgtgaacgaaggagactgccatggcacaaccgcgtccgtcattgacgctgatcctcgacctcgacgagcgcctcgacagcgaggacgtgcgcctggaaatcgaccgctgctactcgtacgtagggtcgacactggtgcgcacccatcccgcctgcgacggcgagccgcagaacatcatgcgcttcctcgtgaagctgggcacgcgccgctacctgcgcgccgaggacgagggcgccgacgagctgtggaacgacgttatggagcgctggttctacaacgagctgtacaaggtgagtaacaacatgctgatctacaaccgccgccagcgcgaagtgggcaacccccagctggtgttcgactggatcgacgtggagctgcagaacggccagctgcatgcgctgctgcattgcgacaacgtcagcggcatccgacccgagaccagcgagcttctgacgcagctgcgcgcagcgtacaacgaaggcgctctgggcgaagacgtcgtgcgcgcctacctgcccgcgcccgcttcatacgaggaaaagaaggccgccgggctggcggcgaaggccgagcgcgacgcgcagaaggcggcggagctggctgcggcagaagaggaggcccgggctgcggccgcggcggccgaagccgcggcagaggaggcgtttctggagctgccgcgtttggccgacgacgccgcctccgaagaagaggccgagccagctcttgagccgttcgccctggacgagcccgacttcgaggtcgactaccgcttgtggctgatcgaatacgccgacggcagcacgcgcacgttcgactcgcacgccagaaccctcgcgtaaccgaaaaggagccttaccatgatcgaaaccatcgcctccttcgacgggcgcatcgccaaggtgcaaggacctgcgcgaagcggcaagaccgaagcgctcgttcggcgttgcgcctgcctcgtgcgcggcggcgccgccccggaaaccatcctcgtggaaacgtcgagcgccgcagcggctcaggcgttccgccgtcggcttcgccgcgcgatcggccccgacctccaacacgccgccgacgacgtgcatgtgcgcaccgcgctcgaaacgtgcgtcgccgtgctggacgcgcccgccgcgcgcgccgccaccggccgcgtgccgcgcctgttgaacgatgcggagtacaacttcttcctggaggatatgaagacgctcggccagcccatccgccgtttgcgcaaaatgctcgatttcttctatcgccagatgagcgacctcgagccgcgcgactcctggctcgcaggcggcgaagaggaagccgtgctgtcccacctcgagcgcgtgctggcctcacgcggcgccatgctggcgcaggaagcgcccagcctgtgcgccgcgtacctgcgcagcgacgcgggcgagggcgtgcgcggcagctacgcctacgtgctgtgcgacgacttccagaacatgagccgcgccgagcagacgtgcctgtgcctgctggccgaccgccagctcatcgcgtgcggcaaccccaaccagcagcaggccgcgcgcgcgtcgttcccctgcgccgagggcttcgtgcagttcgacgctcgccgccgcgacgtagccgtgttcacgctgtccggagcgcacggcaaccccgccatcgccgcgttcgccgacgggctttgcgaccagggcgacatggatcccgccttcaaagcgggcatcgcgagcgacgcgcagacgtcggacggcatcatggccgtcaagtggtcgacgccggaagacgagctggacggcatcacgaagtacctgcgcattctgctcgacggcgaagaggacctgcacgagaaccgcacgtgcgtgctcgtgcccaacaagcgctgggcgctcatggcgcagcaggtgctcaagcagcgcggtttcgccgtggcgctggccggagcgttctcccgtttgggcggcgacccgcgcgacagcgcccgcgcccgcgcgctcgtggcgtacacgaagctcaacctgctggccgatccgcgcgacatgacggcttggcgcagctggtgcggcttcgacaactacctcacgaacagcgatgcatggggcggcttgcaggctttcgctgaaaagcgcgagctcacgctctacgacgcgctcgccctggccgaccagctggaagacgaaccgttcctgcgcgcgcacgccctggtcgagcgctggcgcgcgggccagaagcttatcgccgcgaacgtcgggcgcaagggcttcggcctgctgcaggccatcggagccgacggcctgcccgagttcgaggagacggcgcgcgccctcgtgggcgacgaggatgcggcagcggtgttcgccctgcagcgcgccaacgtcaccgatcccgcgctgcccgacgatcctcacgtgctgcacgtggcctcatacggcgccctgtgcggcgtcgaatacgacaacatcttcgccatcgccgccgtggacggcttcatgccgcggcgcgatgcgttcgaggtgatcagcaccgaggaagaccgcgagcgcatcatgaacgaagagcgccgactgttctgcaacagcgtgtcgaaggccagcaaacgcctggtcgtctcctatttcagcaaagcgccgctcgagcttgccgagcgtgccaagatgcaggtggtgcgcgtgaaggccgagggcaacggccgcgtggcctcggtgcgtcccaccgcgtttttggccgaagcgggaaacgccgcccccgtcaccaccggcggccaagccctcctcgcccagcacgggttgaactagccgccatcgcgccgccgcccagcggcggcgcgaagctgccttcgtactggcgctccagaccaagaagagccttccgacgcgcggctacgcaggctttccctgccgcatatcctgcagcagctctttccgcagccggtagcgcttcatcatccagctcgcgtcgttcggcggaaggcgctttcccgtcagcttcgccaccgcacgcgccgattcgtcgaacttccgagcatcgaagaactggtcgggcgtaatcgagaccaccgttactccctgggaaatcagcgcgctgcgacgagccgaatcccgcgtctcggccgcgttgccgctgtgatgctcgccgctgtcgtactcgacggcaacgtgccgctttcgccaatacaggtcgcattcgaagcgttcgcgctgaaccaaccccttcgtccgaacctcgatgcacgcgttgagctcgggaaggtccaagccgtatccgccgatcatccgcgacaagcacaaggccatgaccaggttcgtctccataggagatgccgacgagtccgcaatgaagcgcagcgctcgcagcgccttgttcgacccgatgcagccgcgcgacttctcgacgaagcgcctgagcgagcgcacgtcggtcaaaggcgtgcgtttccgaaaacctcgcttgtcgccatcgtacgcatatcgcgagcacaagagacagccataccgaacaagctcgaccagcgacagctccgtcgccatctccacgaaggaccgctcgggcgagctgatgtacagcccgtcgcgcaaccggacgaaagatccagccggaaaaccggcactccacacgtggcacacggggctgcccgtccgcacgcgatcgtttgcctgagcgaccacgacgtgcagcggcaccccaaacgcatccagctctccatccgtatcccccatacgaacgccgcagatcggatgggcgcgcgacggcgtgggaaccggcaacgcatcgctcacgcgccagtactcgtaggcagaccaatatccgatgtatacgctcatggttgcagcataccgggcgagcggacgaatggctagccgtcttttgggtccccgaatcccaaaacgggaaaaagagccctccgtgcaagtttttcgacttcgtggcaaatacggcagaagcccacctggggtttttcgttcacagttccgacaagcacccccgcttcattctccatggaacgaaaacgcctgatgaacgggttcccgttttcgaaagccttgccacgaagtcgaaaaatttgcacggaggggcccgaaaggaacccgggcccgcagatcgtctgcaggcccggcgggagggaggcaatatcgagaggtttcggcaacctactatgcggcgacttccacactgtccagcagctcggcgaggatggacgcatcctcctcggcgaagcccatggcaagctgggccaacccctggtagaacaacgtgcgcgagaacagccgcatgtcgttggtcaatagcggaagccagttcagcaggtggtcgtgcaggaaggtccgctgagtgcgcaactgccccacggcctcgtcctcgtcgcctgccgccagcgcctcgaccgcgcgcaggctcatgcgttgcatgaactcgaactccagcgccacgtggtcctcgccctcgttccatgcgccgcgcttcaaaccgttctcgcgcagcgtctgcagcacttcggcgcgcgcctcctgcatcatcaggcgacgttcggaggtgtacacgctctcgtacggataggcggccgagtacgcgttcaccccgtggccgatgaacgtgcgcacgaagtcgatggcgagctcggtgacgctgtcgtcccatgcggttttcagatagtcgtacagcagatggtacccttcgtccaccttcgcgttgcccgtagcggtggggaagcgcatggcttgcagctcccgcaaggagtccgcgtccacttcctcgcggaacaagtttgccagcaggccgtacgtttgagcgcgcatgttcatgagcgcaaccaggtcgacggtttcctcagacatggttctcctccttcttcgcagcggcggctgcttccaccgcaggcagcatcgcacgtcccagatcggtcagacgccacgcgtgctcgctccattccagcgcatcggtgcgctccagcatgtcgatgaaatggccgccgaaacgccgcgggctcttcacctcgtcgaacgtgtccaccaggtcttctatctcgggtttcgtgcacgggcgctcgtcgacggcgcgcatgaccgcgcggtacaccttcacgtaacggctgtcgcgatcgagcacgatgtcgcggaacgcagagccctgcgtcagcctctcgtacagcgcgcttccttcttcggtagtgcgccacacagggtcgacgcgttctttgatctcgagaaacgcaacgcccgcctccacgtcctcgtgcggttcggcggcttcgggcatctccaacgtcaaggcgccggcacgttcgagcatgcggcacagcgtcatgggcgcgtacaccgagcggttgctggcctgcgccgcttccacgtgctcggccacgcggctcgccgcgcacccgccgcggcacaaccccatgatgctcagcagcacgggccggcgaccggggttgtgatccagcagctccagcacggcagattccacgccaccttggcgcttgggggtgtacacggcttcgcgctgcatgctctggggcatgttgcgcatggtgggatagtcgacggtatcaagcgggttgtcgtcgtccatgtcctcctggtcgatctccagatcgtcggccatcagaggatcgaactcgtcgtctaagcccagcacgtcgtcaaacgatacggtaggcatcattcctccttcttctctcttcgctgcgttcgagtataggggctgcgcgcgacggctcatcatcctacaaggcgtaattacgcagggattcgcgcgcatcatacgccggggccgcgaaatcaccttgacgcgcgcttcgccggctccctataatcggggcgcgttgcgagaagcggggcttcttaggaaaggaagctccaatggccaacgtagcttggggcaagaagattcttgccgttgcggttctgagctgcctgtgcgcctcgatcgcggttcctgcctatgcgttctactacgtccacggcgaagagaacgttgctgcaaccagcaagggcgtcatcgaggtcacgtgcacggtggacgaaaccgctcagggcggaggcgtgaagacctcgctcatcatcgttcccgaaggcagcaccgccgctgcttgcctggacgagagcgtggtttccagcaacagtcagaacggccttgcggccattcacgactacagcgtctccagcttggcggacgagctgtccggcaagcagtacacgtgcacggtgcacaaggccgacagccagaagccgggcacgcacaccgcgttcgacggaagcggcaccgagggcgagagcacgccgctcgagcgcttcgacagcgtggtgttcacggtggcgtaatccgccgcgcgggggttcggacgaccagccgggcccccgcacacctcccgttccggctcggcaagcgccccgttattcttcacaagccggcccgatgcagcaccgcgacgcctcagcacgccctcgaaagcagacgggcgcccttccgaacatcatcctcagaggattatttttctattaccccagatcaaacgtttgcgcatcgagcgcaaaaccctgatcgactcgctcacctcgctagaaaaaacaacctctgcacggtatgatgatgcccagggaatcaaggagggggcttcatggggattcgcgttcctcgcatcaccgtcaacgccgacttcggcgacgacaccgcgttcggcgacctgagcttgctctcggtgggctacggactgcaccaggcttgggtgtacgccgtcatgttcggaacgcccaccatcttcggcacgcaaacctacgtcaccggcatgtacggcagccacgcgtcgctgccgttcctcgtctccatcgtcgtgttcgggctgtgcctgttgttcgccggcatcaccgaccagcggctgttgaggacgtacatctcgaagaagacgcttgcggcgggcgcggcgctcatgtcggccggaacgttgctgctgcttgcgacgcccgtgatcagcggcccggcgctggaagcggtgtcgggcgtcatgacgggcatcggctccgccatcctgattctgttctggggcgtcgcgttcgcgcgctgcgacagcgcttccatcgtgctgaactcgtccatcgccatctccatcgccatcggggtgtacgccatcggcctgcattacgggccgttccccatcgccggcatcctcgcgggcatcatcccgctgctggagctcgccatcctctggaacaaaacgccggcgccgtattccgagcgcaacgaggttcccatcttcaaaccgcttccggtgaaccatgccaagttcttcctgcgcttcggcattcccgtgttcgtgttcggcgtggcgttgggcacgctgcggcaaacgtccatccagtacatcgtgcccgcctcgaacgtaggcgaccagatcgccatgctgctggccgccggattcgcctccgtagtcatcctcgtgaccatcgtggcccttggcggcggcgacaaatggagccggtacttccgcccgctcgtccccttcatcgccgtcacgctgttcttcctgccgctttccgaaatgagcgacaacacgttcgccaccatgttcttggtgatgggctacctgtgcttcgaggcgctgatgtggatattcttcggcgagctggcgcaacgcttccgcttgtcgcccatctacgtgttcggcctgggacgcggcatgttggcgctggcggggctggcgggttcgctgtttcccatcgtggcggcgaactgggtgcatctgcttccgttcggcgaacagggcgtcatcgtcatcgtgctgccgattatggtggtggcatacgcgctgctgccgcgcgagcgcgagatcgaggccatcgtcgcaccgtgtccgctggtgaaagccgtgtcgttggaattgagcgaccgcgtgcggccgctagggcaagcgggatcggccggcgagggagccgccgcggccgcgcaatctggaaacaacgcgacggcagcgaccaacgcgcctgcacctgacgccgagatcgcgcccgaacccgaaccgaccgcgcggcgcgccccttcgctgctggaactcagcagcgcacgccgagcagacgagggcgaagagcgaaagggaggcggccgcttccgcgcgaagtgcgagacggttgccaacacctacctgctttcccggcgcgagacggagatcatgttctttctggcgaaggggcacaacgccgcgtacatccaggaaaagctctacatctcggaaggcaccgcgaaaacccacatctgccacgtctacaagaagacgaacgtccacagccagcaggagctcatgcgcctcgtcgagcttgcggatcccgccgaatagcgagcttgcccctcgccgattgcagcgcgcggcctccgcgaccgctcgcaaatcccgcgttccgtgcacaaacctggtcgtcgatccgcaggcgcgttcgcacgatctcgacacgctcgcgcggttgcacggcgttccccttcgccgtcgtgcagttcgcgacgcaaggtttgcctcaccccagctcccgctgaaacgccaggcgccttcgcgctcgcacaaccgcacgacatcccttgcagctacgccgtcaacgcgagcaagaaacggttttcgagggcgcttctgcaaatttttcgaccttgtggcaacgcctcttattcatgagatgttctgaccaggcttttctccgcatctcaaaagcgcacgcactaccgtgacaaatcggcgaacacctcgaccagggaaaacgattgccgcgcgtgccacgaagtcgaaaaacttacaaatacgggtcgtatttccgctttgggtacgcaaccgaccgtcgacgcgcgactacgagggagaaacgcaagctcgcaccacggcgcaacgagcgcgcaaattcgtcagcaacctcgcgtagccctgcttcccaatcgtccacgccttcgcgcaaaccccgcctctcagccacccgcactccggcgtaacccctgcttcccaatcgtccgcaccctcgcagatcccgcttccctatcgtccacgccctcgcgcaagccccgcttcacaataatgacgattgcgtaaaggatggggcgcgggcagggggtttatggcaagatggaacattgcatagtcatatgcagggacacacgaagtaacctggttgcgtttgggcacgcgatcgcgcggaacacgccagcgcggcgttgcctcccgtgcgcgaacccggcatccgccgaggttcgagccacgcaccattaaaggagatgcaatgggctttctttcgagattcgaaggcaggatggaagacacgttcgagggcgctgccgacaagatgttcgacgctcccatctcgccggtccagatagcgaaaaaggccgagaagcagatgcgccgcgagaagatggtgggcgcgggcaagcagtacgcccccacgctgtacaccgtgctggtgaacccggacgacgaccgccgcctgatgggttactaccccacgttggcgggcgagacggaaacgtacctgactgcgaaggcctccgaacagggcctcgtgatggacggccagccgctcgtgcgcttcatcgtggacgaggacctgaagcacggcaagttcgacatcatcgccgaagcggtggccgctcccatcatcgcgcagctgcgcgccgaggagatgcatcgttacggcctggccgccgctcccgcgcccggcgggtacggagcccccgcgcagccctaccccgcgccgcgcccccaggcgccggctccgcagcagtacggcggatacaaccagggctatgccgccccggctcccgcgcccgctccgtacggcggctacgaccagcacgatccccagggccagtacgaccccgcgcccatgaacgtggacgcgtacgggcagccgcaacagctcccctacgtgccggaagacgagatcgaccgatccatcgactacggcgagtacaccttcgacagccgcgacttcgacgagcagcgcgacagcatccagcctctcgaccgtcccgaagccgtggattcgttcgccatcggcgcagccgcagccggtgcgggagtcgccgccggcgccgttgccggagcgggtatgggcgccgcgacgccgcagccctaccccgccccgcagccgcaaccgcaggcccagccgcgcatggccgccgaaaccgtcgtgttcgccggcgggcagcaagcggcgacccccatgcccgcgcaggccgcggtgcgcgcccgcctcatcgacaccacgaacaaccgcgcgtacgacctggcgtcggcgcgcctgctcatcggccgcgagtcgaagaacgacatcgccgtgcacgacgtgaacgcatcgcgcacgcacgccgagctgcgcttcgagccgcaaggcgtatggaccatcaccgacctcggctccacgaacggcaccctggtgaacggccgcgaggttgccacccagccgctctccgaaggcgaccgcatcactatcggcatgacgaacttcatgttcacccaagcctgagcggaaacggaaggataacccgtgatcgacgtcgtacttcttatcgtacgcctcctgttcgtcgcgctactgtacctgttcctgttcgcaattatgaaaacgggcatcgggctggtgcgcggtcagcgcaagaaggaacgcacctggaacctctcggtggagaaggggccgaaggagctgcgcggcgtatccatcgtcgttcgcgggcccgtcatcgtgggccgcagccccggagccgacatcgtggtgggtgccggatacgtgtccggccgccatgcgcgtttccagcttatggggcagaacctgttcgttgaggacctggggtccacgaacggcacgggcgtgaacggccagcccatcaccgagcccaccgcccttcggaacaacgacgtcgtgaacgtgggcgacgtggccattcgcgtgaggttcgcctaatggctgccgatcgttcgtataaatccactccgcgcacccgcaagggggcgctcacctcgttcggcagccgcaccgacatcggctgtctgcgcgatcacaacgaggacagcctcgtggtcacgccgcccctgtttgccgtcgccgacggcatgggcggccacgccgcaggcgaagtggcgtccgagatagccgtgcgcgtgctgtccgaacttgcccccgaacatcctgacggggaagcgctcggccgcgccatcgaggaggcgaaccgcgccgtcatccaagcagcgcgcgaagggcgcggccgccaaggcatgggaaccaccatgaccgcggccatgctggaaggcgagcgactggtcatcgcccaggtaggcgactcgcgcgcgtacctgctgcaccagggcaagctccagcagctcacgcgcgaccacagcctgatggccgacatgatcgaggccgggcagctcacgcccgaagaggcgcgcacgcatccgcagcgttcggtgatcacgcgcgcgctcggcagtgacgcgcacctccaccccgacatctacgagatcaacgtcgaaaccggcgaccgcctgctcatctgctccgacggcctgtcgggcatgatcttcgacgaccagatcgagaataccctgcgccgcgtgcaagacccgcagcgctgcgcgtcgcagctggtgaacgaggctatcgcggcgggcggccacgacaacgtcaccgtcatcgtggccgacgtgaccggctacgccgaagtgcgccgtaagaagcttgcgcgcaagaccaagctgtccattgcgctggtgctggtgctgttcgcggccatcgtcgccggagccgcctggggcacgcaaacctacctgaacaccgccgcttatctggcaaacgacaacggcaaggtggccgtttatcggggggttcccggctcggtgctggggctgtcgttctcgcacctggaacgcaccaccgacgtgacggtggccgatctgcaaccaggcgtggccaaccggctgaacgagggcattcgcgtggacgacatggaagcggccgatgctctcgtgaaggagtacgaggacgagatcgccgcacgctccaagaaccaggcggaaggcggcaacgccgaaagcggccgaaacgcggacgcgaaggatgcgtcggacgctaagaacggcggtgccgcgtgacgcgccgcaacgtagaactcgtcctgctgctggtggcggcgcccgtggtggcgctgttgttcgccatgatcgccatcaaccaggggcaatcgctcgacatgaccaccctcggtgtgccggcggccatcttcgtggccttcgtcatcgcgcacctcgccgtgcgcaagttcgccgccaacgccgacccggccctgctgcccctctcgttcgcgctgtccggaatcggcatcgcgttcgtcaccagcttggctcccaacctggccgtcggccaggtgatgtggttgttcgtgggcgtagcgtgcatggtgctggtgctggtgttcgtacgcaacctcgacaaggtggcgaactacaagtacacgctcatgatcgtgggcttcctgctgctgctgtcgccgctggttccgggcctcggccaggagatttacggcagccgcatctggctgcatatcggcagctactccttccaaccgggcgagatcgccaagatcgtgatcgtgctgttcctggcgggctacctcgcgcagaaccgcgagatgctgtcggtgttcacctggcgcgtgggcccgttcaggcttcccgacatccgaacgttgctgccgctgctgctgatgtggggcatcgcgctggtcatcgtcgtgttcgagaaggatctgggcagcgcgctcgtgttcttcttcgtgttcctggtcatgctgtacgtggctacgggaaagaagttctacctggtcatcggtttgggtctcatcgccatcggcggcatcggcgcgttcatggccttcggccacgtgcaggtgcgcgtgaacacctggctcgaccccttcgccgatgcgcagaacacgggctaccagctgacgcaggccatctactccatcgccgacggcgacttgttcggcgtcggcatcgggcgcggcctggccgaacagatccccgtcgttgagagcgacttcatcttcgcggccatcgcagaagagatcggccttctgggcgcggccggcgtgctgctgctgttcctgtgcttcgccgtgcgcggcttcgtgacggcggcgcgcgcgaagagcgacgtcagctcgtttgtggccgtgggtctcacgtccatgatcgtgctgcaggcgttcatcatcgtaggcggcgtgaccaggctcatcccgctgacgggtcttaccctgcccttcatcagccagggcggctcgtcgcttttggccagcttcatcatcgtaggcttcctgctgcgctgcggcgacgagggcacgggcgtgggtcaggagatggccagcgccaccacctcgctgcacgccaacagcgtactgggccgcgtgtcgctgggcaagcgcctgaaccacagcatgctcttgtgctccgccctgttcgcgctgctggtagcgaacctcacgctcatcatggtggtgcaggccgactattaccagaacatgccgggaaacaaccatacgcttgcgaaagaagcgcgctcggagcgcggcaccatcgccacgtacgacggcgtggtgttggcgcgcagcgtgaaggaggaagacggcacctacgagcgagagtacccggcgggcgacttggccagtcacgtggtaggctactcgtcgcctcagttcggcaactccggcatcgagaaggcgtacaacgacacgctgaaaggcgaagagaacttcgcatcgtggaccgacgtgctgaactcgttcgccggcatcggcaccgcgggaaacgacgtgacgctcaccctcaactcgaagatccagcaagccgcgcaggatgcgcttgccggacgcaagggcgcgtgcgtggtgatggatcccgacacgggcgccatcctggccatggcctcggctcccacatacaacgcggccgacttcgcggcggtcatcgagcaggcgaacgcgaaccctgatgacagcaccctcgtcgatcgcgcggcaggatcgctgtacgcaccgggctccacgttcaagatcgtcacgctggccaccgcgctcgaggacgacgtggccgacgaggacacggtgttctcctcgcccggcaccatggagatcggcaacgcaaccgtctctaacttcaacaaagcgaactacggcagcctcaccttggcccaagcaaccgagctttcgtcgaacacggtgttcggccagctaggcgtagagatgggcgctgacaagctggtcgccggagccgagagcttcggcttcaacaaggagatcgacttcccgctgtacacgcccgaatcgctcatgccctcggccgaggacctgcaaaagagcccctgggagctggcatgggcagccgccggcgagccggtgggagacaccacgcgccccggccgcgagagcccggccggcccccaggccaccgtgctcgagatggccatggtgggcacagccatcgccaacgacggcgtcatcatgcagccctacctcgtcgacagcgtgaacaacgccaacggcgaacgcagcttctcggcctctccgacgaaactgatgcaagccgtcagcaagaccacggccggacgcgtgcgtgacgtgctgctgggcgtcgtgcagaacggcaccggcaccgcggccgccatccccggcatcgacgtagccggcaaaaccggcaccgccgagaaggagaacggcaacgacagctggttcgtgggcatggcgccggccgaggatccgcgcgtggtggtggccatcgtcatcgaggacggcgaagagggagtgggaaccgctaaagcgcagaatgtattgaaaacagctttggaagttcagggacttttgtagataaggtatgctgatggcccgtatactgtctggaagaagtatgcagcccagcatgtaacctaaaggagctaaaacgtgaccggaaacatgataggcagggtattcaacaaccgctaccagataaccgagcgcatcggcatcggcggtatggcagaggtgtaccgggcgcaggacaacgtgcttggccgtctggtcgccgtgaaggtcatgctgccccaatacgccgccgacccgaacttcacgcagcgcttcaagcaggaagccgccgctgcagccaacctccagagcccctacatcgtgaacgtgtacgattggggtcaggacgagggcacctattacatcgtcatggagttcgtgcgcgggtccgaccttaaaaccgccatcatcgagcgcggcgccatcaaccagcgcaaagtcgccgagatcggctcgcaggtatgccaggcgctttccgtggcgcacggactggacatcatccaccgcgacatcaagccgcagaacatcatggtgcagcccgacggcaacgtgaaggtcatggacttcggcatcgcgcgcgcgaagaattccgtcatgacccaaacctcctcggtgctgggcacggctcactacatctcccccgagcaggcgcagggcaaggacctcaccgccaccagcgacatctactcgttgggcatcgtgctgtacgagtcggccacggggcgcttgccgttcgacggacccgatgccgtgagcgtggccatgaagcaggtcaacgacctgcccgtgccgccgcgcgagatcaaccccgacatcgaccccgcgctcgaggccatcatcatgaaggccatcgcgaagaacccggccgaccgcttcgccaccgcgaaggacatgcgcctcgcgctgaacgactacctggccggacggcccgtcaacctgggcgaaggcttcaccagcgccgagaccgtggtcatgggcggcgtggtgccccccgtcggcgtggccgacggcacggccgtcatgcccgcgatgggcggcgtcagccccgcatcccccaccgcggcgcagcgctcctacaacgcgaacaacaccagcgggaagaagaacaacaagaagaccatcgccatcgtcatcggcatcatcgcggctcttgccgtggtaggcggcatcgcgttcgccctcatgtcgggcagcgggaacgacaaagacaaggtcgccgttcccagcgtggtaggccagacggtggatcaggccacagccgccatcgaaggagccggtttcgagctggggaaggtggaggagtcgttcgacgacaaggtcgaatccggcaaggtgatcagccaggatccgaagggcgacagcaagcaggccaagggcaccaagatcaacctcaccgtgtcgaagggcgtgcaagagatcaccgtgcccgatctgacgggcatgactgccgatcaagcgcagaaagcgctcacggccagcgggctgaagtacgcaaagggagccgccgagtactccgacaccgtcgagaaagaccacgtggcgcgccaggacatcgcagcaggcgagaacgtagccaaggacaccgtggtcacgtgctacctgtcgctaggctccgaaggcatcgaggttcccaacgtggtgggcatgtcgcgcggaaacgccgtgaccacgctgaataacgcaggcctgatcgtggataccgacaactacacctacgaggccagcgaccagccggaaggcacggtgctcgcccaaacccccgcagcaggatcgaagctgcaaaaggacggcttggtggcgctaacgctgagcaaggggcccgagaagaagacgttctccgtcgcggtcaacgcgaatggaggcggcaagatctcggccagcgcttcgtcggtaaccgagggcgacagcgtcaccatcaccatcacgcccgataacggcttcgaggttgcatccgccagcggcttggacgacgtgccgaagtcgggcggcacgttcaccatctcgaacgtgaaggccaacgtcaacgtgaacgtcacgttccaggcggtcacgcccggcccgacccccacgccggatcccaagccaaccgacgacaccaacaagaactaggaatctccgcgatgcgccttcgggcgcatcgcttttttatgcgtcctgcaaggcgtcttgcaagttccgcgccagcagggcgattaatgctacaatatcaaacgcgcctccgtagctcaggggacagagcaccgctctcctaaagcgggtgccgcgcgttcgaatcgcgccgggggcaccatttggaagtttcacgaacggcctgttgatcaggccgttcgtgttttttcaaagcaagttctatctcatattgcgtgctttcgcacgaatcaaagttcatcacggccacggcggtgctttcatacagccaaactttagatacaaaagtaagcgtgatctgctcgtccgacaacgcgcccttcgacatatcagagaagaacgctcggagttcttctctgctgacactgttttgctcgcgcttcaattcctctatgcgcttctccaaagcgcgctcttgcgcatcgagcgcggcaattttcggctttacgtgattaaaatcaaggccttcagcgaccgctgacaaaagattgtcgcgctgcttttttaccgctcttatgtctttccttactgcttctatggttgccttcgactgacgttcatccctaaactggatatgcctgtcaattagataatcaaccagcgcggcatcgcgtagcatttcgcgcacgcctgaaacaactccttgttctacagtctctttattgaacgaccccaagcacgccttgcgtttcccccggcagctataacgccagtattcgatgccgcttccgccaattgcggtttcgccgtgcataggctctttgcacttggagcatattagcttcccggaaagcaggtagtcggcattcgtcttcaaacgccttctgaatcccaacttttcgatgcaagacagcttttgcgacatgctcacaatcgctggcataccgtcttctatgtatacaaggggaacgggtcgcccgagatcatcaagcacgtcatttccagcttcgtctttttttacaccccacatatatacgcccgcgtagcgcacgttcttcaacatgcttacaacgaaaccgtatccggggtctttgccgcgcgccgttttcactccgatactcaacagccaatccagtatctgcttcggcgctacacccgaaagaaaatcgacgtggatgcgttttgcaatgggcgctttctccgggtcaagcgtgatcttgtcgccatcgtggctataaccgtacaacggatagcccaggtactggcacttcctagctttgccaagcataccacgcatcgtatcttccgcgctctgccgtgatctgacttcggcgaacagcgcgttcaaagccttcgtgctggtcgcttcgattgacgtaccggcgatgttctctttcaccgattcgaaagtcactccgccgttcttgcgcagcacgtgttcgtaatagtattgctcctcgatgttccgcgcgaacctatccatcttccaaacaaggattatttcaaacatgcccgtctttgcatcctcgatcatgcgcaagaaattcgggcggtcatcgcttctgccactcatggcgtagtcgcaatattgcatcacgacagtgtacccgtggcgctcggcgtatttattgcattcataaagctgatcttctatggacgcatcgcgctgtttgtcacaactgaatcgcgcatagatggctacacgaattagcttgcgagacatggtagaatatccttgcctttcattcgaaaacgaaatgtctttctggttcggtgattaggcagaccccctgtagccgccaagctattgcagggggtcatttcatttgtacaaaacaagggttctgtacaagattccagcttcattatcaaactttatatcaactatttcccttccctgattctgaatatagcttagaacctgatcgagttctgaactatatttttcatcaacggcaagggtttgcggcctggaaattttcccatttgaaaccaacagcaaaacatgcgtcaagccgtcttgggatgctaaattctgcaatgcctgctgcgcggcattgtcaattaaagcttgctgcttatctgaactgccaccaaataaagccatcattcatcccttctaggcgatagccgcacggctggaaaatggatgatcttgcatttcttttttctcatacttgccagatgacaccagatcgtccgcgtatccaagaagctttgccattccttcatcgttgagcaatttgacggttcgcaacagtttatttatctcgtcatcatcaacaatatcgctacattcagaattgttaagttgcccgtactttgtaccaagaattgtatcggtggacacacgatagtagtcggcaagcattgatagcttgtcgccatttaagcttctgctaccttgctcccaacttctgtacgtgctaagagcaattcctaaatctgcggcaacatcttcttgaagcttcccaaacgattcacgtatttgcttcagattgtttttcatcgctgcccctttctgtgcatacggtaacacattttgtcgcagtagtaaaacaaaacctattgcagagtgatatgttttgtgttagtctcgattaagcagtgatacagatcgtgttactaggagcaattatgactaatgcaatcgcaagtgagcggaaacggaagggtctgacccaaacttcgctgggcaacatgatcgggaaagatcgctccactatcggaaggtgggaatctaacccgcgagtggcagattgcggcgatcttgaaaagcttgccgatatttttgactgttcggttgattacttgctcggcaggactgacgagcgcaccccgtcgatgcgcaaggcgggctaaccatggatgggcgcaagtacgtggcttccttcattgctaacgccgaaggtgtcaagaagataaagctgcatctggtagctgggtcagatacagcagctgtacagcatgccgtcatctatgcgacgaagatgaacctgtctgacctgccgaagttgctacacgtctacgaagccgataacgattggaacgagggcagggagatagtgacatgcttcggttagaaatccttcagaccaagaagctgaatcgcagcatcggtgaagcccgtgtagcatggcgctccgttactgaaggaaccactagtaacaagccctgccgccgccagttcgcgcatatcgtccaacgctgcggaatcgccgtacacgagttcaccgtgaacgtattcggaaaaatcagcgccgccaatgcacgccttcgcgatgttttcaagcgtcgccttcgcactgctgcttacagccatggtgtctaccttccagaaacgatgatggctaagtatagcgcagtgcaaatcagatcgcgtgcgggcatgacaacgggcgggcgcggtacgcaaaatggaggccagacactcaaaaactgtcctaacaagaccgccccctttctggtcagtgaaacgaacaggggctttttgagagccgacagcaatgctacctgcttcggaacccgttgtcatgttcgcacgcgatctgatgcgttgcgtggcgaatgcgagccttgcgaccgccgaatatcgcccatgtgcgaatcgctcacgaagacaggcgctttgatgttcgtccccgcctacctgtctttgctgcttgccatggctgtaccgttcgctcccggcgatgcccttcgctttctgctgctgtcgctgtgcttcatgttcctcggtgccggtgtcgctttccttgtcgcgtctgatatcgttcgggggcgttagccatggctcgcaagcaaaagcagaagcgcagcccttggacaacggcagaactgacgctgctggaaaaccatgccaacgaaggcatagacgcgttgtcgaagctgctgccgaaacattcaatgcaatccattcgcagcacagcatcgcgaaacggaatatcaatcgcgcgccgctggtactgcccgatgtgcaaccgggaagtgtatgtacccctgaagccatcgacgggctggtgccgcgagtgcagcaagaagcgcacccttgacgagaatcagcgcgtgaaccgcgaacttcggctgcgcaacctcggaattgaaacagaagaacagcgcatagccgatctggataagcagataaacaccctctatcaagacaattcaagattgcgaaaatctaagccacaacgaagcaacatgggagccgaccagcgcaaacataaggaaggctcaacatgaaagattgcgaagtgttctttcacacccgtatcgcagaactgttcgaacaatggaaggagggcgaacatgccaaaaaagagaatgagcgccccgctgcaaacgaaagcgctcaaacaccaaaaggcaatacatatgttatcacacggcgcaaggcttcttagcctgacctgcgtcgccatctcggctgctgtcggcgctgtctacatcgccgccgcagtgatggggggtgcggacaatgcgtgacgcgcgcatcacctttcccgaaaccgaagcttccgcttgcatccgcaagccagaacgcggcctgaagcacgacatggtgcagctgatgcgcgacaacacccgcctgcgcggtgagaacttcgcgctgcgcatggagatcgcccgtctgaaggcgcagaccggcggtgatcaggcatgagcgaagaagaatacatgaacgtcatctacaggaagaccgaacagggcatgcggtgcgaattcgccgtccactccacgcttgcacgcgagttcgtggaggaaatcatagacaactgcttcgacgcgaaggttgagtgcgacccgaactttgcgctgggcttcgccgcagccatcgacgcgttcacccatggccgcatcgacttcagaggtgcggttccgaccgtgaacgacgcgtggcacgacgtgaacgacgtgacgggcaggccgtgccgcgtgaccgactgcatgcgcgtctactgcgacggggcggtgtcgtagtgaagcctgtcgtgataaagcaccatgcggacggcacgccctacgcaaggccgtaccttggcatcaacgccgttaccaaagcgccgatgcgcccgtacaagcgcttccccgaagccgccaacgacgaggaagcgcaggaaatggcgcaggagtgggtgaacaccatcgcggcggctgctgatctgcacgtgagcgtgaagcttgttgaaatgctcgcgcgctacatcgaccggcttgaagcgaacggcaagtcaccgaacacgatcaagacgtaccggtcgctgctgcaatgctatgtcgcgccgaacgtcggcaacgtcggcgttggcgaactgaagccctacatggtcgatggcctgtacaacgtcatcctgatgcgcgagagccgcaagggcggaaccatatcgcccaacacggtcatcaagcttcactggttcctgtcgggagcgtaccgctacttcgtccgcgaaggcgtgtgcgagttcaaccccatgctgtcggtgacgaagccggaacgcgatctgaccgaagccgtagcgttcaacgaatcggaattcaacgtcttgtcgaaggcgctcgcgaaggccgtcaacgagcctgcggagagccgcgaagcgatcttcaggcgcaacgccatgttctcggcgtacctcgccctgtggaacggcgagcgctgcggagaagtgcttgcgaacagcaaggccgatgcgcagcttttcaggcagctgatgcacatcggaaacacgctcgtggagaagaaggggcatctgtaccgcaagcccaagccgaagtccaagcgcagccgcaacatatccatctacgatgacgtgtgcgcgaacatcgaacggcactacgaatggcaggccgaataccttcccgccgcgaagcagaacgactacaaccgcatgatctgctgcacggctgacggcgggcttatgcgcccttcgacggtcagcacggagttcagcgccctgctcaaaacgctcggcctgcctcgcggcaccagctaccacacgctgcgccatacgcacgcgacctggctgctgcttcagggggtcgatctgaagaccatcgcagagcggctagggcatgccaacgaagcaaccacgctgtcgctctacgcgcacgtcatgccggggcgcgacgaaatggccgcagcggccttcgcggaagccgcaaagcggatgggcggtgcgctatgaccgaccagctgatgggcatcgactacttttccctgtcaacgctcatgaaggacgatgacaaggtgttcgacctgaagtaccgctacgccgtgccggagggcgctacgggcgaagcctacgacaacgacgcggccttcgcagcctacgggcggttcgtggaactgctcgcgtcgatctaccgcgaagggttctgcctgcaaatgtcgaagcagacgcgtctgcgccttagccagcagctggggttggcgctcccggcgttcgacgcgttcattgaaacctgcgtcgaggtcgggctgttcgattcgtcgctgtggaatgccgaacgcgtgcttacctcgcacggcatacagacccgctacttccacgccgtcaagcgccgcaagggcagcttgccgaccgatctgaagcctttcatcctgctcggctctaacgaatgcgaacaggatgcagacacggaaggctctgcaacgtctgacgatgcgcgcaccgtgcaaacaccatgtgaacatgatgcgaacacgctgcatacagaatccgacatagaaaagaaaagaatagaaaagaataaaagaggaaagaagaaaataacggcttcttctctttcgaattcgcttcttttcgagccgaagcagcagccctatccgctcgcatgcctttcatgcgcatcgggcgacggccatgcgtacttggacgatgaagacgcgccgcacccgacaccgtgggatgcgctcgtctcgcgattcgggcatgtgaccggcggcatgagcatagagggcttcgctcgcgatgtttcaaagcaatgcccagcggcctgccccgaaagcgacgtgcaggtttcgaagtgcttcaagctgctgtccgacgcgctggtgaagtacgacccggcgaagtgcgcttcacccactccgcttgcgctcgcgatcttgaaagacagggtgatcgaggatgactagggcgatcaactacaagaaggctacgggctacgcatgcccgacgtgcggcgggatgctcgaatacctgttccgcgaggacaggcgcgggcgcatgcagcgctatgaaacgaccacgcggcacaagaagcgcattgcgccagacgatgttgcggttgataaagtgcgcaaggtttcggcctacgaatcgaagaaggtcggcgttgagtacatccacacggggaagttctgctgcccggtctgcaactgcgtcatgagcgaggggcaggccgtggcgaagaccttcgccgaagacgagtttccgcccgactactacgtttcgagcgaaccggtctacgttgaccccgaccgcatagcagcagacctgcttgcgatgatgcgcggcgagtaccgcagcaggtcgcctgatgcggctacgacggtacaagggcggctcgacctgtaatagcgccacttggcggcggcgcaaacgaatcagaaaggcaacgacatggcaaacgaaacgacaatcccgttactgttcccggaggaattcaacagcaacgccgcgtgtctccttcaggcggtcgaagcagttgttttcgaagaatgctgcaacaacggctgcgtgttcagacgcggcggcgcgttcctgggattcgacgttgagcatccgaccagttgcagccacttcaaggtttccgcttgcgctccaatcgaatgcaccgcgttccagcccgattgcggcgatgcggcatgagcggcgaccgcagcaagatagtcgagcgaatccgcaagcttctcgcacttgcggatgacaagggcgcgaccgaagcagaagccgtggccgcagtgatgatggcacagcgcctgatggccgaaaacgacgttgcagattgggaactgcactcgatggacgaacagccgatagctaccgcagaaagcgagcctgtgcgcaggcggtggcgctggacgcttgccgatgcaatatcttcgaacttccgttgccgatactaccagaatagaaaacgctgcgcaccgaccggatggaagaccgagtatcgcatgatcttctacggatacgaatcggacgcgaaggccgcagcgctcgctttcgactacctgtacaagatcggcgacaggctgggatgcaggcaagctggcaaggcgtacagggagcatggctattctgacggagcctacaacgggttcgtcctgggcttcgtcgccggagtgcgctcggaacttgaaaagcagtcgcaagcgctcctgatcgtcgtgccgccgaaggtcaacgaaagctacgaagcgttttccgttgacttcggaaaggcgaaaaccgacgtgtcggttgcccgcacgtctttttccctcggcgcatacgaaagcggcctgaaggaaggacgcgatgcggtgcgttcgcgccgcatggacgcgccggacgaagacggcgacggcatgcgcgccgtcgcgcttctcaccgaatgaggggcggacaagatgggtaaatacgaattgccaccggattacaaatgcccgtactgcggaaccggtcacgatgccgactacgacgtgtgggaaggcgttgacttcgagggagaaaacgatatcgagtgcaagcattgcggcaagacgttctacgtctaccggtcatggattgcctgctacgacgtttaccaagcaccggcggtctgcggccattgtcccaacagcacatacaacttgttaagcggagattggtcatgcgcgaccaacggatgcgagaaggtgagtttatgaacatcgacgaaaagagcgcggcgctgcacgatgcggcgcgtctgtgcgggttcgacggccatgtgaaggtcatcacctacaagaacgaatgcttcacgcacgcagagcagatagcggaaacgcatatggcaaggccgttccctgtgaagaattcctacctgtactgcggcacgctcgacacctgcttctactacgacaaggagaacaacgcctgctgctcgttctccggccttgtccggtacggcagcggcgactacgagcgcatggggacaaccgcttccctcgttcaagcgatgcttttcgcgatggacgtgaccgcgaaatgccagaaaagcgagaaaggggacagatcgtgactacaactaactgggaaaagtactttgggacaccggcgaaggcaagcaggacaaccgtgcagtggtacggaaacagaatatcggtcgagcatagagggcatgaagtcgtagatctaccgaagcgccgttataaggcatggctggaaagcaaaagcaacgtcgattggggtatgcgatgaatgcacctgatgtaaagaaaatcgtagaagaatggcttgaaggagaagggtacgaagggctttacaacgaagccggttgtggttgccagctaagcgaacttgcgctttgtggcgaaatgacccagaactgcgaagcggcctacctgttcgattgctcacgctgcgcaaagcgcccgtcatgcgatatcgcagacgaagaacagccgtatctcatgtcaaccgacaaggacttctgcgagcctgattacacggtcgctgcacctgccgccgccttcgctgcggatggcgcggcgctgcccgcctgcgctcccctgacggtcggtgaagcggtcttcggcgttgactgcgcgaacgctcccgactggtacgcgcagggcggcatcggagaagcgccggaagatgcgctgaagatcgaaccgggcgaagtgatcatgccgattgccgacatggcggaagtgatagcgaaggccatcgccgataccgcgccgaagcccaagcccgcagcgctcgctatgccgcttcctgcaaaagaggtgtgccaaaacactgccaaaacagaaccggcgagccgagtgcttaaagaggacagaaccgcagagtacatcaggtttttggagtacggcgcgtaagcgcgcagcaaagaacaagtaattctttatttcgagtaagagaagccatgcccaacgaacatggaaaggaacgaaattgacagtcagatgcgacgtttgcggcgctcctgctttgagaagcgattcgtatagaagagattggtacaaggtcaagaaagacaactggaaagggacttttaacgtctgccctcaatgcgcagaagcgtgcgggcttgccaaggcgtattcgacggttaggacgacaaacgaagcggcatggaaagaaattgccgcgcaagcgaaagatggtgaatagcaatgggatacctgaaagagcgccacgggatgacgatgcttcccggaattccgaaggaagggcaatgccccgaatgcggcgtgttccacacgccagatcagccgcacaaccgcgacgcgctgcgatatcagtacgcgttctatgacgcgtatggacgctggccgtcgtgggctgatgccatgtcgcattgcgctgatgacgttaaagcgtgttggacgcgagaacttgaagcgcgtggcatcgacgttggcaaagcagctgaattagagagcatgaacatatcagtgaagttcggaggatgacgatgctccattacggaatcacgcagatcgacggcaaaccgcgcgccgttgtctgcttcggcttcgcagaggtgcgaaagcttatcgacaaaggtcacccgatcaaattcagggcgttccacaactccgaatccgcgaaggagtacgtcatggaaacgttgcggcgtgcggagaacgagcgcgagcggaaaaggcttgacgaacaccggcaagcggtgttgagggaacgggaacttgaagaacaatctaagcgaaagggattgaggaaatgaacgacaccaaagcagaagcgcccgaaacgaaagccgccggatgcggacttgtcctacttttcatcggcgctttcgtgggtgcgatagccctcggtttcgccttcggtgcgcatataggcttggcagcatacgcgcttttctgcatcgtgtgcggcctgctgctgatcgtcgccgccgaacgcaatgcgaagaaaaatgccgattagctggatggaatgcgagcgctgccacgggttctttcccatcaggcggcggcgcggccacatgagaaagcgcgggcacgtgaagacgatgtggtgtccgtggtgcaagaaggtcacgcagcatttcgaacgattctgaaaggattgggaacatggcaaagcaacacctgacgataacgctcaatttggagccttctcgccaattcgacatgattgcgcgctgtctcggctacgtgcgaaccggcgacccttcagccgatgacctggcgaacctgaacaggcagattgaagcgcttggcatcaatttcgatgaaaggagcgacgaagatgaaggccgtgatcagtaacccgatggccgtaaaggccgcggcgaacgtggcaaacggcggatactacctgtcgttcttccagattcggcgcgttggcgatgttgcggaggtgagcggcacgaacgggtacgtggtcgtgatcgccaccgtgccagcgaagttcacgcgctggggcgacggtaaaagcatcatcctcggcggaatcgagacacgttcgatgatgcgcgggataggcaacgccatcaagcacgcgcagcaggtcagcttcgagcggtcggcgcagaacgtgagcgtttcgacggtcagcgacggcgcaacgttcagcaccagcttcgatatcgacccgttgcagttcccgtacagcgttgaggggttcaaggatgggtactcgtgggacgattgcttggagcgcatcagcggaaccggcgagccttccgcagacaccgcaatagacccttacatgatcgcgactgcctgcaacgcgatcaaggctcttgccgtgcaaaggggataccgcctgtcgctccacggcgagtacggtgccattgagttcaagatggacaacgacgattgcatcgtccaggccgtcgtgatgccgatcaaggacgtggcctgatgcccgatatggtcaaccatccgtcgcactacacggcgggcggcgtggagtgcatcgaagcaatcagggcggctaccggctcgcagttcaccgggtatctatggggcaatgcgatgaagtacctgtggcgctttccgcacaagggaagcgccgtacaagacctcatgaagtgcaagtggtacatagacaggctgatcgatgaagtaggcggcgaagatgaacgatgacatagagggacacaaggagggaatcgcgcgcgccgtcgtcgcaatcagcgaagcaaccatgtattccaccgccgagatcgtggaaatggctgcgggccttgcgcgcgtcggcatggccttaggtcaatgcttcgatgaaatacgccgctgcctgaccgccgaagaaggctctgcatactggcgcagggcggcgaaggccgctgcgcgctcgcgcgctaactcgtctaaccgaaagcgcagacggcacggacgcgcgcaacggacgagagcgcgccgctgatggctcaaccatgggcgaaatggttctacgaatcgcctgcttggaagcacgctcgcaaggcctatgcggacacgcagcacgggctttgcgagcgctgcaaggccaagggtctgatagtgaagggcgacatagtgcatcacaaggtgtacctgacacaggacaatatcactgacacggccattacacttagctttgacaacttcgaactgctttgcttcgactgtcacaacaaagaacacaacgcgaatgcgagcattcgcgcgggcttcggtttcgatgcggacgggaacgtaagaccgattggctgacctgcttcgataggtcggacaccggcggcaatcccccctattcggaagcgtcggcgcagaaaaatactcaccgtcgcctgaagaagaagaaagatagattcggttttttggaaaagggggtggtcttgcgtgaacgaagggaacattggtatagttgtgaacttttgcgccgcagttgccggtcgcgccgatcacgccgccgcagaagcgccgaaaaaaacgtttggtgatgtggtcgaatgaggaagaaccagacgaaagaagaagaaagggcggcgcgccgccgcgaagccgcagccaaaggcgttcacacgcgccgcaccaacgcgatgaacaagaagatgaacgccatactcgaaacgatgcccgaagaccagcgcttcatcgcaaaggagttggcggacaacttcgtgttcctctcggtgcgcatcacggagttgcgcgaagcgctgctgaagcagccgtccgtcatcagctacgacaacggcggcgggcagaccggcttccgcgagaaccccaacatatcggtgtacaacaagctggtgacgcgccatgccgatctgtgcatgaagctggcgaagctgctgccagaagcagccgacgatgcgaaggacgaactggaagccttcatagggttgtagcatgaagttcgaacgcgattttctgcggtacttcgagcaggttgaagctggcgatatcgtagtttgcgacaaggttgcgaaggccgtcatgcgcgccttggccgagatacgcaaccccggacaatggcactactccgaagccatggcggcgaagcacatcgacttcatgcagaagttctgctatacggcggtcggcagcgcgccgaagccgatagcgttcgagccgttccagctttcgatcatcgcccacgcatacggcatggtcgatgaccggaacctgcgcaaggtgttcgaagaactgtggatgatgggtcgaaagaacggcaaaacgacggtcggcgctgccctcgaagtcgatgccgagtacaacgacggcgagtacgccccgcacatctacaacgccgcaacgtcgaaagaccaggcgatggaaagcttcgagccgtgttacaacatgatcaagctgaacccgctgctgtggaagaagacgaacaagcccaagacgaaagacgtaggcaagatcgagttccccttcaacttggggcgaatcgagcggctttccggcaggccaaacagcatggacggcttcaacgtccatttcgcccttattgacgagttggcggcgcacaagacgcgcgacatatacgacctgctgaagcagggcatccagtcgcgcgaccagccgcttgtatggtgcatcacgacgaacgggttcgtgcgccagggcatattcgactcgcaatacgaatacgcggagaaatggcttgacggcctgatcgaggatgacagcttcttcgcttggctctacgaactagacagcaaggacgagtgggaagacccgaaatgctggataaagtcgaacccaggccttggaaccgtcaagaaggagcgcttcctgcgccagagcgtcgagaaggcgaagaacgacccgtcctaccttccaaccgtgatggtgaaggacttcaacctgaaggagaacagttcgaccgcttggctgtcttgggagcagatcgtgaacccctcccgcttcgagttctcgaagatgggcttccgctacggcatcgcaggattcgacgcggctgaaacgaccgacctcgccgccgcgtgcgtgctgtgcatgaagccgggcgatgaccgcatatacaagaaaagcatgtactggctcccgcagaccgtgatagacgagttcgcggagagcggcaaccggaaggagcgcgacggcgttccgtacacgcaatggcagaagcgcgggcttctccgggcgtatccgggcaaccgcgtcgaaaagggcgtgttcctcgaatggctcacggagttgcgcgaggaagaagacctgtacacgttcgccatcgggtacgacccgtggcatgttgacgatacgtcgaagcggaacatggaactgttcgtcgggaaggactactgcatccctattcgccaaggcgcgaaaaccatgtcagaccccatgtactcgttcaagggcgacctgacggcgaaccgaatcgtgaacaacgaccaccccatagacacgtggtgccgcctgaacgccgccgtgcgcatcgacaacaaccgcaaccttacgcttgacaagaagaacaacgacaagcgcaaccgaatcgacggccttgcagccgaacttgacgcgtacatcgtgctgctgaaccgatgggacgagtaccagaacatcatctgacctgctgaaacgtaagcgcccaatcgccgaccgaaaacccctgacacggtttctatcctatgaaccatgggacttttggaaaagatattcggcaagaaggccgacgaagcgccgccgaaggcaagcggctacttctccacgctttcaagctacgcgccggtcttcacgacctacgacggcggcgtgttcgaaatggcgctcacgcgcgcggcggtgaacgccatcgccacgcagtgcagcaagcttgaaccgttcgtcaccggcgcggccaaccgtcagatcgaatctgccttgcgccagaagccgaacccgtacatggacaagacgaagttcctgtaccggacgtgcgccatcctcgaagcgaaaacgacctgcttcgtcttccccatgcgcgatgcctacggaaggataaacggcttctatcccgcgcttccctcgacggcggcggcgtactcggtgcagggcgaactttggtacgagatcaggttccccaacggccagagcgtcttagagcctgcgacgaacgtcggggtgctgacgaagttccagcttgaaaacgatctgttcggcgacggcaaccgcgcaatcgagccgaccatgcagcttatcgacgcgcagaaccaggcgatcaacagcgcaatcgagaacagcgcgagcatcgattggctggtgaaggtggccggtcagagccgaccggaagacatcgccgcgaagcgtgacgagtttgcagctggcaacttgagcaagtcgaacaccacgggcgttatggcctacgacaacacgtgggagaacgttacacccatcgaccgcaagcagtacacggtcgatgcggagcagatgaagcttatcgagaacaacgtcttcaactacttcggagttaacgaggaaatcctacagaacaagttcaacgaagacgtgtggaacgccttctacgaatcgaaggttgagccgttccagcagcagctttccctcgtcctcaccaacatgacctattcagatcgcgagcgtgcgcagggaaacgccatcagcttcatgtcatcggccatcgactacatgagcaaccagacgaaggcgacgctgtgccagtcgatgacagaccgcggggcgatgaacgcagacgagttccgcgcgaagttcggcatgccgcctgtgcctgacgggatgggtcagcagttcgccattcgcggcgagtacatcttggccgcgaacctcgcgacgaacacggtcgccgccgcgaaggctgctgccgaagcgaacaagagcaacgaaagcgaaggtgcagaagatgccgattagccaagaccgcgtgtaccgcatgttctccgccccgctcgcgacagcgccagcggcggagcatcggaagatattcgacacggactactacgttgagggatacgcgaccacgttcaacgacccctacgaactgtgctacggcatccgcgagcagatatcgccgggcgtgcttgacggcgcagacctgaccgacgtgatcatgcagtacgaccacgaaggcatggtgttcgcgcgcaaccgcgctgggaacctgcacatcgcatccgattcgcacggcatcttcatcgccgccgacctcggcaagaccgccgccgcgcgcgaactgtacgaagccattgacgcggggcttgttgaccgcatgagttgggctttcactgtcgcggaagaatcgtgggacaacgaaaacgacctgcgaaccatcatgcgcgtgaagaaggtctacgacgtttcggcggtttccatccccgccaacgatgccacggctatttcggctcgttcctttgcaaacggagtgatcgaaggaaagaagaaggcgcaggagctgcgccgccgccgtaaagcaatacaactgaaagcaatgatcgcaaaggagacaacgaaatgaacttcagggacgaacttcgggcgttcttcgcgggcgtgccgcttgagcagcgaaacgccgacgaactgcgcgccatgctttcccgcatcgccgacaacaccgacagcgccgacgaggaagcgctgacggagtacgagcagcgcgcaagcgagatcaccgacgagatcaacagccgcgcccaggccgcagcttccggcatcgagcagcgccgcgcagccgtgcgcacgctcatcgacgctggttccgccgtgcagatcgacattcccgccgcaaacgccgaaccgcgcgcctacgacgcgtccagcccggagtaccgcgacgcatggctgcgcgagatggcgaccacgcacgacggcgtgcgccgcacctacctgttcggcgagcctaccgcagagcagcgcgccgcctacaccatgaccaccgccaacaccggcgacgtcgttccgaccgacatcatgaacgagatcgtggagttgatggaagccgacgcgccgctgtacgccgattcgtaccgcacgtcgttcgcccatgtatgcgagatcatccagcacatcggaatcgagcagggcgacgcagcggaaaccgccgaaggcgcagcgaacgatgacgagcaaaacgcctggaacatcatccagctgacgggcgttgagatcaagaagcacgtcaacctgacccgcaagatggagattcagagcatcgacgcgttccgctcgtggctcgtgcgcgagatcgccgaccgcatgaaggtcgccatcgagaagcacctgtacaagcgccttgacgagggaacgacgaagggcgcgaaggccggtatcgtcgcggcgaacatcctcaccggcacgctggacgatgcggaagtccgcaaggcgttcggacagcttgtcggcgacggcgacgtgaccgtgtacgcgaacagctacaccatctggaacgtcatcgcgggaatcaaggaggatgacggcacgaaggcgttcatccccaattcgatgaccgacccggtggcgaaaggccgcatctacggttcggaagtgaagaaggattcgacgcttgcgaacaacgtcatctacttcgggtatccgaagtcgttgcaggcgaacgacttcgagcagatcaacgtcatgaacgacgttgatgtgaagaaccgcgtccgcacctatagcggctatgcccttgtcgatgccggtttgcgcaaccctgccggattcgtgaagtacacccacaccccggcgaccgccgccccatcgaccgaatccggccagcaggcgggctaaggcagatggagaaggacggcttgacagacaaggcgatgaccgccctgcgcatcaccgacgatgccttttgcgacgaggttgacgggctgtgcaaagcagcccgtcacgacctgaagctgtccggcgtgatcgacgcgaaggccgattcctgcaatgacccgctggttgtcgaagcggtgcttacgtactgcaaggcgcgcttcggcctggacaaccccgattccgaaaagtattgggcatcgtatctggcttgcgagcgcgacatgctcaactcgcaggaatacaccgtggaggtcggtgaggaatgagcggcttttccgaaacggcggtgctggtgcatgtcacctacgctgaaggcaagaatgggcggcagttgcccgaaagcacgcgcaagcgcgtgttcgtgaaccccttcagcgtgagcgccgccagcttcaacgtggcggacgcggagggcatgcgcccgcgccatctgctccagatgcgcgcatgcgactaccacggagaggaaacaatcgagtatcgcggcgaagcccttgcgatcaccgacgtttcgcgcggcgggcgcggcgagttcgtgcgccttacctgctcgcagaaggtggcagacgatggctaggaaaacgagcatcgaccgtcttaccgcgaccatgacggcggtcgcccgcgaattcgttgtggaaaagcagctgacggcatcgaccgccgtcaagcgcatcggacgcaaagcagccgccaaccttcgcgcaaaatcgcccgtcaaaagtggcgaatacgcgaagggatggggcatgcgggaaaagaagtcgttaggcgttggaacgacggtcgagatcaagaacaccgcgaagccgtctttgacgcacctgctcgaaaacggccacgagttgcggcaaggcggcttcgccccggccataccgcacatccgccccgccttcgagcaggcggctgacgagttgcgaaaggagttgggcgaatgagcgaaacggcggtgttccaggcgctgaagtcaaccggatacccggtgcatcttctcggcgcgcacgacgattcgagcctgccgcgaatctcctattccttcccgtccgcacccggcttcttcgccgacagcaggacgtacaggccgatggagcgctgcgaagtgcgcctgtacaccgaccagtacccagacgaagccgccgaatccgccgttgaaacggcgataggaaggcttggcttcgcctacgcgaagcaccgcgtgccgattccaagcgaacgaatgcacgagacaacgtacacgttcacagaccttagatgaaaggaacgagatggaaaagaaaacaggcgtgcgctatggcgtgcgcaacgtataccttgcgtggtttgacgaagcagaagacaagttcgaaacgcccgttgcccttccgggatgccgggcgctgaagaccagcccggaaggcgacacgaagaaatggtacgccgatgacacggtgtacttcatcggccgcgcgaacaacggctatagcggcgaacttgaacttgcgaagtttgcgctgaagatcatggcggacgcgcagggctggacatacgacgaagcgaccggcgtgctgtacgaaatcggcggcaacgtcgttgtgaagcccttcgccctgctgttcgaagtcgaaggcgacctgaccaacacgcgcttctgctactacaactgcacgcttgaccgacccgaacacgaatggggaaccactgaagacgaggtggagccgacaaccgagaagtgcggcatttcgattgacccgtacatgatcggcgaaacgccctacatcaaggcgatgtgcgagttgagcgccaccaacgcgtccacgttcgacaactggttcaaatcggtgaaccttcccactgcgacgaacagcgtcgcgggctaaggggggaacgacatgcgcgaagtaaacaccagcaaggacacgaagctgaacatccacgccacttcgatgacgtgcctgctgtatgaacgcgagttcgacggtgccgatatcgtcaccgacatttcatcgatgggggaaacgccgaaattcggcatcatgcgccgcgccttgtgggcgatggcgaagacggcggcaccttccgtcataccgccctattcggcgtggatgaacgcgaacgccgacctcgactacaaggaaacaagctggatgaaaggcgtgatggaggaagcgaacagggagttttttcgaagcaccgccgaagcttccgaagtcaaggcaggttagcgaagtcggcgaagcggcgcgcaggtatccgtaccactcgatggcgttaggtgcgctcgccatgggcttcagctacgccgacctgtgggaaatgcccttgaacgactacctgatcttctccgcaatcacagcagaagcgaattcggcggcttcgagcgcggggagaggaaaacgctacagagaagcgacccaagccgacattgagagtttgaaaaggatgtagagcgacgtggcgacgaagtacgaaggcatagtgatcgaactgggggctgatacgtcagaccttcagtcggccatgcgccaagtcaattccgccgcgtcgaagacccaaaaagaactgaaccagatcaagaccgcgctgaagttcaatccggggaacatgacgctgcttgcgcagcagaccggccagctgtcgaacaaggtcgagcagaccaaagaccgcctgaaggttctgcgctcgcagctgcaagccatgtcccaagaccaaagcaagatcggcaccgacgaatgggacaagcttcagcgcgagatcatccagaccgaaagcaagcttgaatcctacgaagcgcagctgaagcaggcggagagggcgcagcagtcggccagcacgtcgctcggccagctgtccgcgaagatgcaggcgaacgccgacaggttcagggatatcggcagcagcatacgcaacgtcggcgttggcatgaccgcaggccttacggttccgctcgtcgccgcaggctcgcaggccgtcagcaccgccgcgaccttcgatgatgccatgtcgcaggtttccggcgcgctcggcgacgcgggcgcggacatggacgggttgcgcacgctcgcgcttcagctgggcgctgacacggtgttctcggcaaccgaagccggtcaggccatggtcgagttggcgaagggcggtctgaccgaagcagacatcaagtccggcgcgctcgaagcgtcgatgaacctcgctgcggcaggcggccttgaacttgccaccgccgcgaacgccacggttcagtcgatgggcgcgttcgggcttgcggctggcggtgcgagcgtcatcgcgaacgcgctcgccgggtctgcaaacgcttcgtccgccgacgtggcagacctcacgcaggccatgtcccaatgctcggcacaggcgaacctcgtcgggtgggatatccaggacacagccgccgtcctcggcatgttcgccgacgcgggcatacaaggctccgacgctggcacgagcctgaagaccatgctacagcgccttgcagcgccgaccgacaaggcggctgacgcggtggcggaacttggcttgcaggtgcgcgaccaggacggccacatgcgcagcgcgagcgagatagccgcagaactgcaaacgaaactcggcggcttgtccgacgcgcagcgcgacgctgccatgcagaccatcttcggcagcgacgcgagccgcgccgccgccgtcatgatgacgcagggcgcggacgggcttgcgaagtacaccgaagcgacccacgacgcgaccgcagccgaaacgatggcggcggcgcagaagggcgaactgtcgtgggcgatggagaacatggagggcgcgatagagagcgcgtccatcgcgctgggaaccgcgctcgctcccgccatccaggccgtcgccggattcgtcggcgacctcgcgacgtggttcagcgaactagacccgtccatgcagacggtcgttgccgtggcgctcgcgctcgtcgccgcgctcggcccgattctgaccatcgtcgggatgatcatcatggcgcttcccggactgacggcaggcctttcgatggttgcaggtgcgatcagccttccgctcgcccctatcgccgccgtcgtggctgcggtcggcgcggtcatcgcgatcatcgtctacctttggaacaccaacagcgagttccaagccgccgtcatgaacatctggactgaaatccagaacctgttcgcgacggtgatgccgatcattcagcagatattcgaagtggtctggccgaccatacaggcaatcgtgaccggcgttctcgacacgattcttgcggttgtcggaaccgtgttcacggccatcgccgaccagatatcgacgatactcgcgatggtgacgggcgtgattcagggcgcgtgggacgtgatatcgggcatcttccaaaccgttctcggcctgatcgtcggcatagtcaccggcgacttctcgatgatgcaggacggcataagcagcatcctgaacggaatcacggggatagtaacgagcgtttggaacggcatcgcatccacgatcacgaacgtggtgaacaccatcgcaagcgtcgtttccgacgtgttcaacggcgtgtcgaacacggtcggcagcatcttcggcagcatcgccgacacgataggcaacgcaataggcgacgctaagaacgtcgtttctgacggactgaacgcgattgccaacttcttcagcgggctgcacctcgaattcccgaagttcacgcttccgcatttcacggtttcaggctccttcagccttaacccgccgtccataccgacgttcggcgttgaatggtacgcgaagggcggcatcatcaacaagccctccgtgatcggcgttggcgaagctggcgctgaagccgtcatgccgctggcgaagctgcccgaactgatggccgaagcgttgcagatggtgcgcggcggcagcggcggcggcaccgtgatcgtgcagaacatgaccgttgggaaggaaagcgacattcgcggcgtagcccaagaactgtaccggttggggcagcgcgccgcgcgcgtggaaggcacggtgtacgcatgatctacaacggcttcgacttctcgctgtacatggtggacgaggatatccgcgaatccatcctacccgaaacggttgttgacgcgctggacgttccgggcgcggacggccagctgttcaattccgcgacgttcggaacgcgcgtgatcgagatcgacgtgcgcgtcatccgcgagaacaggcgcgcgctcaacgaactgctgccattcctggcatcgaagctgcacagcagaacgccgacgaagctgtacacgcgcctgcatccgggggaatactacatcgccatgctgacggggacgatagacttcgaaaagtggttcggaacgggcggcgcgaccgtcacgttcgtcgcctacgaccccgtgcgctacgttgacgatgaccgcaccgtggcgctcggctacgccgcgaaggacgtgcagatcatgggaacctacctcgcgcggcctatcgtcgcaatcgacatacccgcagcgtgcagctacgtcgccgtcagcgacatgaccacggggcttgtcatgcgaagcgaatacgccttcaaggctggcaaccgcgtcgtgttcgattgcaccgttggaaccgaccgcatgaaggttccgctgctctacgcgaccgcaacgtcaacgaccccgacgaagcttcccatcacgccgcaatcgcggtggttcgagttggagccgggaacgcacaccatgcgcatactgaacgcgtcaagcgcggtatcggcgaccatgacctacgccgaaagaaggctgtagccatggtcgaactgctggtgtacgaccgctggggcgcgcagatcggcacggtcacgcccatcacctgcacccgcgccgaggaagtcaacggcgaggacaccttgacattcacgacacccgtccggttcgagaagggcgaccgcgttgtgttccaagacggcggcggcgtgtggcacgagcacgtggtgaccgaaaccgacgaaagccgcgaggaagcgcgcgtgctgaacacggtcatcgcggagaacagcctgtgcgagacgaacggcgactacgtggaagacctccgcaaccagaacatggccgcgtccgccgcgcttgcgaaggcgctttccgtgaccaggtgggagcagggcgctacgtcaagccttggaagcaagtcgcagaacttctaccacatgagcgcccgcgcggccatcaacgcggtggccgaaacatggggcggcgaggtcagaacggaaatcagcgtcgggacggcaggcgtttcgcgccgccgcgtgtcggtcgtgtcgcgcatcggcggcaacgggtacaagcggttcgagtacaagaaagacctgatatcgatcaggcgcaaggtcgaatctgacgatgttgtgacggcgctctacggctacggctccggccttgcggccaccgacgaatcgggagaggaaacgggcgggttcacgcgcaagatcaccttcggcgaggtgaacggcggcatgaactacgtagccgacaacgaagcccttctcctgtggggtcgccctgacggcacgctgcttcccggcgggcttgcgcacgttttcggcgaagtcgaatacgacgagtgcgaagacccgtccgaactgcttgcgctaacgaaagcggaactgccgaacaggacgaagccgaaagtcacctacgaagcgacggtgcaggcgctctgcgaagctggtttcaggttcgagggcttttccttgggcgatgacgtgcagatcatcgactgggcgttttcgcccgccctagagttgcaggggcgaatcctgcgcgtcgagtggaactaccgcgtgccgtccgaaaccgtcatcacgcttggcaacgtcacccccgccatttcagaccagatcaacaggcaggctgcggcgttgcagagcatgcgcgaccattcgggggcgtgggacaaggcggcgagcgccgacgaaagctacatcagcggcgttataggagttatcaacgccgtcatgaacgcgaccggcgggtacgtctacatggaacccggcgagggaataaccgtctacgacaggccggttgaccagaacccgaccatggcgatacagctgaacggcgcgggcttccgcatcgcgaacaggcgcgtcggcgacacgtggcaatggcgcacgttcgggactggcgacggcttcagcgccgacgagataaacgcgggcatcatacaaggcggttccaactggtggaacctcgaaaccggcgacatgctgttcaaacagggtggcatacgcgatagcaaaggaaagaacttttgggacttggacaccggcgagttctccttgtccgccgatgccaagataggcgacaagaccgccgccaagatagcccaggatgccgtggacgcgcagacgcagcgcagcatattcaacaagctgaccaacgacgggcagacgcagggcatctacctttccggcggcaagctgtacatcaacgcaacttacctgaagacaggcatcatcagcgacgtttacggaagaaactcgtggaatctcgggagcgggacgctcacgaccaactacatgaaagcgagcaacatcgacgcgagcggaacgttcgaatgcggcacgtcatcgaacctgctgcggctcatcaacggcgagattcaaggcatagaaaacggtgtacagatcggcgttgtcgatttttcggcgcatatgagaaacgtcagtaccgggcagcttacgaccgggttgcagcttaccggcaacaaccacatacgcatcaccacgccgcttatctccgctgcggcttcgagcagcgaatcaacgacaacgacgcatgcggtgacaaaaaactgcaccctgcactacataagcaagatcgaccctaacagcgacgggactatcacgtggtggaacgcgacgcgaaacatcaattttgtggacggcttctgcacggtgtgcaacttcgactaaggaggattcaaccaatgggcaacatcctgtactacctcgcgcacgaccctgtaggaaattgcgaatggcaggtaagcgacttcgatagatctgcgctcgccaagaacgctgaaaacaacatcgtgttcatagccgttgacgagagcggcaaccgcgagatcgtggacgcgtcagaggtcgttgagccgcccgcgatgggggaaccgcttgttctcgtccagcctgtctacgttgacgagcgcatgatggccacggtagccgttttcgatgcccttgcggcagacctgtacccgtccgccgccgtaatgaccatgagcgccgaagccgctgattctgccgctgaaggtgggttcatggcggcggtcgcacgactgaagggactggtttatggcaagcaagattagcgaagcatggtatctgcgcccgctgaccatcgacacggcctaccagcgcgccatcgaagacatggtggcttcgccggaggacgcgaagggcaagggaatcgacctgaccctgaagtgcaacggcgaagccgttgacaccacgggctgcacggtgattctcggctggcgcaacctcaactccggcaagagcaactcgcgcctgttcgatgccgtcagcgcggcttccggtcgatggaaggtcacgtacccgaccgaaatgctgacacccggcgtggtgcttgcgcgcgtgatcatcaagctttctgcaaccggcagcgtcatcacgtcaagccgcgagttcaggataatcgtcgaacactccatcaccaacgacataacgggcggctcgaacgacgatctgtcgatgttccagcaggccgtcgccgacctgacggcgacgaacgacgcggtggcgaaggccgagactaagcgggtggaagccgagcaagcccgcgccgccgcagagcaggagcgcttgcgcgccgaatcgatgcgcatcgacaacgaatcgacgcgcatcgattccgagacggacaggacaacggcagagagcgagcgcgccgccgctgaaaagacgcgcgtcgtaaacgaggaaggccgaacccggagcgaaagcgaaaggtcgcgagcggaaagcgaaagagcagccgccgaagaagaccgcgtgtccgaattcgccgagttgaaaagccaatcgcaatcagcgacgaacgcagcagacggggcggcgagaaaggccaacgcagccgcagacaacgccaacgccgccgccgcaaccgcgtcgaacgtggtcgcggaagccgtcaaggctctgtcgcagcaggacggcgacagcgaagccgcgcagatcgacgctttggcgaagcttctgcgcgaagattacggatgcttctaccttgcgaacaccatgtggacgaaatcaagcgacacgacctatgcggccaacacgatcacgctcgcctgttcaacctacgcaagcggcaatatcacactaggataggagaataaaaccatggcagacgtgaactacatcaccgacaaaaacgggaacaaggtcaacatcgcagacctgacggcgcgcaccaacgcatcgacggcgctgctcgaatcggagtacaaccgccagcttgccgacaacgtgtacgctgggcgcgacattagcaccatcacggcgcttgcgagcgagatcgcttcggcagggagcatccccgcgttcctgaacgcccgcgcgaaggccggaaacttcaacgggctgcgcatcggcgactggactgatatcgtcctttcgagtggcgtaaccatgcgctaccagatagccgccttcgaccactactacaactgcgccgatgcggccatgggacaccacatcgtcatggttccgacctccaccccggcagtcaccggcgactacgccatcaacggaagctacatctactggaacaccaccaacaccaacaacggaacagccgacgagagcaacccgtatcttgcgagcaacctccacgcctgggaaaccggcgtgttcctcccgctcatgcccacggcttggcagaacgtaatgcgcaaccatcgcagccttgttgaaacgcggtactcggcttccggcgcgctcaccgacagcacaagttggaaatgggcggacttgggcaaaatctggtcgccgtccgaaatggaagtgtacggttgcccgatctgggggacgaagggctacggtcagggcatggacagccagttcccgatattccgcgagacgaagaaccgcatcaaaggtcgcatctcttggtggcttcgctccgtgtcggggggttcttcggttaacgcgtgctacgtcaccagctatggccttgcctactgctactccccgacgtacacgtgggttcgccccttgccctgcttcctcattggagcgtaagagccatctaccgtatacttatctgcgcccgccttgcgcgggcgcaattacccgcgaagcgggtcggtttttggaggggtgtttttgagcgtctaccaacgaaagcgcaacctgtctgactacgaattctactcgcgcgcaatcgcgatacgcgtcgaggtgaacaagcttatggcatcgccgaacgtggtgccgaaaagctaccggcttctgaacgcggtgccgaccgtcgagacggcgcgttccatcgtctacaacataacgcgagccgaccagttcttcccgaacacgtccttcaacgtccttgagcgccggaaatacctcacgcttgcaatcgccgactgcgaacagctgtgccttgacttccaatgcctgctcgaactcggccttccgatcaacgtgaacaggttcgatgcggtggttgaatcaatcgagttggagatatcgctgctgaagggcgcgcgaaagaacgtgaagctggtcggcaagcagagcgccgaagacctcattgaatcgaccgccgccgaactggaaaggctccgtgcgctataatgggcgaacgttacgctttgctggtcgcatcaattggtggcttcgctccgtgtcgggaggttcttcggttaacgcgtgctacgtcaacaacaatggcaatgccaactacaactccccgacgaacacgtgggttcgccccttgccctgattccgctgaacggccagaccgagtagggacatgcccgaaagcagagcctgtagaggaaggaaggcgtgacgttcgggcttgggcccgtgaatctgcaccccgcgagggatggcggacgctgcttgcatggcggcgcgcttcggcgttcagcgccgtttcatgccatcttctcatgcggataccgaacgctgcgctgcaatccgtgcggggtgccttttgaaatccgaggaacgaaggcgggcgcgccgcgcgcggcgcgaggaaaagcgcgcggagaagcgccgcgagcgcttggcatcctgcacgatggaaaacgtcgccgacctgaacagcctttaccgcgccgccgttaaggctaagaacggcatcgcgtggaaatcgtcggttcaaaggtacgagaaggacgtgctgcgcaacatcgtcaaggcgcgccgcgaccttcttgccggaaacgacgttcggcgagggttccacgagttccagctgtacgaacgcgggaagcttcgcaacatttcgagcgtccatatctccgaaagggtgattcacaagtcgctgtcggtgaacgccctcgtcccggcgctcacgccctcgttcatcttggacaactcggccaacacgaaaggccgtggcaccgacttcgccatcagaaggctgaagaagcagcttgtcgcccactaccgcgcgcacgggaaaagcgggtacatcctccttatcgacttcagcaactacttcgcgtccatcgcgcacgacccgctgaaggagatcgttcgagccgcgcttgacgatgaaaggattgtcgcgctgacgcacggcttcatcgacgcgtgcggcgacgtgggcttgggtcttggcagcgagccgaaccagatatgcgccgttgcgttcccctcgtcaatcgaccattacgtgaccgaaatgctgggcgtggaagcctacgggcgctacatggacgattcctactgcctgcatgaatcgaaggagtaccttcaggtcgttcttgcgctcatagagcggaaatgcgcggaacttggaatcgagatcaaccggaagaagacccacatcgtgaagctgtcacacggtttcacgtggctgaagaagaagataagctacggcgacaacggcaagatcgtcatgcgcccatgccgggaatccatcacgcgagagcgcaggaagctgaagaagatggctcgtttcgtcgcttccggggacatgacctttgagcaagtcgaaagatcgtaccagtcttggcgcggctcgatgctccggctcgatgcgcataagacggtgcttgcgatggacgcgctgttcgcgtcgttgttcgaatcgaaaaacctcccacggggggggtctgattaactgcgctttcccggctgcgcggcgcttggccgcatgagcggcgaaaacccctgacacgctttctatcctgttaatagggaaacaacaggatagaaagggcggtgcaatggattcagaaaacgaagcttctgccgaaatcaattcgctgaagctgcttctggcgcaaacggactaccaggctctgaagttctctgacggcgcgatggccgaagacgagtacgcgccaatccggcagaagcgcgcggagtggcgcacgcgaatcaacgaacttgaatcgcaagctgcggcctagcgacgtgaagccgtgatcgatcagctaatcaaaaaccccgacatgatgcgcgagataggctttttctgggtcttcgtcatcgcgctgatagccgcgagcgcctatttcgcgcccgtcatcaaacagtatctggtcacgaagatcaagagttccgcccgcatcgaacaggtcatagagaactgcacggcggcggtcaacaacaactccgaagccctgcggaacaactccgaagccctgcacgcaaacaacgacgagcgtgacacgaccgtcgctatcttgcgcgaacacgaccgcgcttcagacctgcgtttccaagagcagaacgctgcgctgaccagaatcgaaaacaagctacaaggaaggtaaacctatgagcgaaaacgagaacattgaagtgatggccgacgttgattcggaggacttgaaggtttccggcggcacgatcgcgcgaaccgtcgcgttcgcgatagtgtggctgaaccagcttttcgtcttcttcggcgctcccacgctcgatatcgacactgcggcgctgtacgacataatcagcggcgttgccacgttctccgtgtccgcatggaactactggaagaacaacagctggcgcattcccgccctcgtcggcgacgcggtgaaggattcctacggccatgctgcggactagcagcgctgggcgctcccacgtccgcaagcgcggtcgcatcgtgtctgacggccagatcgccgccatattccttgcgcttctactcctttccctcctgtgcgtcggcttggccgcttgcgccgtccatttcgcaagcggccaaccgacagcgaaagagggcgcggaaagcgagacgcttcccgtcagcgatatacccatgccgaaggtcatcccggcagggcgaaccatgccgctttacctgcaagacgatgttcagtgggcgcacatcgagtacgcaggcgacagcaccgttgccgaaagcgggtgcgggcttacgtgcgccgccatggcgctcgaatacctcacgaaccagaagacaacgccgcgcgatctgcaaggcatcgtcggcgacacatgcacggttcacggggtgaacgacatggccttgttcggcgactacatggaacaggcctacggcctttcgcaatcagaaatctactacgacctgaaccaggccgtcgccgacgttgcggacggctccgttgtcttcgcttcgctgacgggtcgcttcggagattccacctacggcggacacatcgtcgcaatatggcacgtcgatggtgatgcggtatgcgtgcgcgaccctgcttccggcgcgaattcgcagcgcagcttcacgcgcgacgagttggcgaacgtcgaatggtcttacttctactcactcacgaacgaagggctttcctatgcttaacggtatcgacatttcatcttggcagaccggcatcgacctttcggtggttccttgcgacttcgttgtcatcaaggcgaccggcggcatcggctacgtgaaccccgattgcgaccgcgcctaccagcaagcgaaggcgcaaggaaagaaacttggcttctaccactacgcgcgcgagaagggttacaagggcagcgccgccgacgaagcgcgcttcttcatcgacagctgtcgcaactactttggcgaagcgattcccgtgcttgactgggaggaagaactgtcggcaggcgtttcgtgggctaaagaattccttgatgccgtctacgccgaaacgggcgtgaagccgcttctttacgcgagtaagagcgtgctgcgcgaatacgactggtcttccgtggcgaacgccggttacggtctgtggttcgcgcagtatgcgaactacaacgcgacgggctaccaggattcgccatggactgacaacggcggcatcggcgcatggcctttccctgcgatgttccagtattcgagcgctggaagccttccaggctggaacggctcgcttgatctgaacatattcttcggcgatgaaagcgcatgggacgcatacgcttccgccggttctggctcgaccgaacctaatgcggagccggtgaaaagcgttgacgatatcgcccatgaagtcatcgcgggggcgtgggggaacggcgacgagcgccgcgcccgccttgccgctgcgggatacgacttcgatacggttcaaggccgcgtgaacgatctgctgggcgcgaatcggcagcgcatctacaccgtcgttgctggcgacactctatcaggcattggcgcgaagctgggcgttgattggcgcagcatcgcttcgagcaatggcatttcaagcccgtacacgatctatccgggcgaccagttgacctactagaaaggaatcatgatggcaaccagaaagacaaccaccgcgaaggctacgccagcaaaggacgtaaaagcgacaccggctgaagccccgcaggacgcaccggtcgaggccgcacaggcaccggctgaagccccgcaggacgcaccggtcgaagaccagtaccctgtcatcgtttgcagcgaagacacgcgcatcacgaaaatcgtcctgcgcgacaatccatccgttgagaacgataacgatgccttgattgttcccgttgggacgaagctgcgcgctgttgaggacatgggcgagtggacgaagcttacccacgaccttttcatcatgtccaagttcgtcaagaagctttaagtgatacgaccagcccaaaaccatgttcaagcatgagtatcggcgttccgttttcggtgtacaacgtctcaaaaggatacccgtttgacgttcgttttgacatgcgattggggcaccatctgatcgcaaaacggcgcctctcgggcgccgtttcttcttgcaagccggaagcgcgttccgccctccccctactggtactcgcgcagagccccttccttcaatacgaggatcacgcaggttcccttgccgagctcgctttccacttccatatgcgtaccgggaccgaagtagccgcagattcgatcgtgcacgttcttcaccgcgatgccgaggccgagcgacgattcgggatgaagaatgttgcagcgcgcctcttcggtcatacccacgccgttgtcgcacacgcgcacaatcacgtcgttgcccgtgacctcgcccgtcacctcgatagtcaacttcccctcgctcggcatggcgtggcgtacagcgttctccacgagcggttgcaacaaaaaaggcggcaccagcatgtcttccacacgaggatcgatgcgcatctccatctccacgcggtcggcaccgaaacgcgccacttcgaacgtgaagtaccgcttcgtttgctccatctcacgcgcgaacacgatcagatcggcggagtcttcaagcgttcggcgatagaacacggcgaattcgcgcagcagcttgcgcgccgtttcggggtcggtgcgaatgagcgaggcgatggtgttgatggtattgaacaagaagtgcgggttgatctggctttggagcatcttcagctccatgcgcgtggccagctgcgtctgctcttccaacgccgacgccgccatctgcgtggacagcagtttgccgaacccttcggcgatggacttctgcgtctcgctgatgtgcttcgctcggcgatagtagaacttgagcgtgccctcgacgttgcggcctacggcaagcggcacgatgatggccgccttaatattcgacgactcgctggggaagccgatatcttcgggcgtgaataggatgcgcagcttgccgtcggcgagcgtggcatgggtcgcgtgggtgcggatgatgctgccgggcaggttctgagcttcctcgaagcctgcgtatcccaaaatctgctttttgtcggtgatagccacggcgatagccgcggtggacggcagcagcaacccgcagatcttctgcgcggccttgtaatccatgccgtcgttcatgcaggtcagcgtttggctagccagcttcaacatggagtcagactgacgagcgcgcaccgaatcgggatccatgatgagacggatgaccaccactatggacagcgtgaacaccacgcctgcgcataccatgattgccacattgcgatacggcaccgcgatggaccacagcaacacaagacccgaaagcgccgtcaccgtgaacatgaacatctcgagcgtgaagaagcgcggcagcgccgatttcgactccctggtctcttcctgcatggtacctccccgcgttgctcaaccctgcccaagcagcgcgcttgagcccatcagcccagtataccgaattcgttgagaacaagtatgacggcggccacaatcaggaagaagccgaagacgaaacgcaatgcgagctcgggaaccacccgcacaagacgcgcgccgatgaccgcgccgggaatagagcccacggcgatggcgatgcccgccgcgtaattgatgtttcccagcaaagcctgctcgacgacgccgggaatggcgaggatcatcacggcgatcagcgacgtgccggacgcctggcgcatctcgatgccgataagagacagcatgaggggcaccatgatgaacccgccgcccacgccgacgtagccggatgccacgcccgcgcccaggccgatccctgcgccgacgagcagctgcttgcgcgtgagtttgcgcggcgcagggtcgacggcagcgccagcctgcgcgctcgccttcgtcggatcgtcaatcgcgtcgtcgttcgccgcagcgtcgcctgcacgctcgatggcggcttcgtccgcctcgatcgtgctgttcgacgctgcatgctgttgcgtgcggttctgcgagcgcatcttgaaggccttgcccagcattttcaccgccgaccagccgatgatgagcgccgcagccaccataatcatccaggcgggcgaaatctgcgcaagccacacgcccaaaggcgaggtgagcgctccgccgaggcctgccgccacgccaagcgacacgatgcacgttttatggcgtatatgggacgccgcgcccgatatggacgtgggaataatggcgaacagcgacgtggccgtggaaacgacggggctcatgccgaacgccaaacggaagatgggaaccatgaccgtgccgcctccgatgcccagcaatccggacaaaattccgatagccacgccggcaatagccggcagcacgaacatagcgagcacatccatagtttgacgcccggtcctttcccgatctctcaacacgcgagccgctcaactgcacgccatcgtacagcttagactgcgccccgtggaggctccgtcatgcaaacgttgccgagcgtgcttatttattccgcgacgttcaggcgaatctcgctcgtcacacccggatcgatgccggccgccgcgatggccgcctgcgccgaagcaagtcggtcggcgccgttgccggcgctggcctggcgctgcgcggccgactgcataagcgccgtacgcaggatctgatcgttctccatgcgcgccatcagctccggccacacgaactggaactcgaagtacttcgagcagttgcgctgagcatacgtcgtcgcttcgccggtggccgccttcgccgctttccggtacgccttcttgtcggggcgcgccaagctcctcagaaaggcggtcaaacgaatgcgcttcgtgatgcctggctcaaggaacgggcccggatacggctccagcgaagacggcttcacctgcaaaaggtcgatctgcgtgcggctgtactccatcttccggtattcgtagagccatcggaagatatcctgacggaagcgcgtgccctcgctctcggtttcgggaggaaggtggcgcaggctccactgattgtcgaaccagatgtccgaaccgtacatacgcaggtcaagcatgtaatcgagatcttcgccgcgcgcgatccaaggatcgaacgacagacgcttgaacgcctctttatgcaaagcaaggcagccgccgcacgtatggttcgatcgggaaagacgagggccgcgcatggccttcgagatccatttgttgaaggcctttccctgctgccagaaatggttgtaccacttgtcctggctcttcgacaggtaggagccttcggaattgaagtagaagccggtcttggccaggatgggaatgcccttcttcgtgagcttgcctaggccgtacatggccttctgcaggaagtcggcgtcatccaccacttcgtcgtcgtcgaggaacaccaccgagtcgaagcccagcacgtcggccatcaccagacccaggttgcgcaccgcaccgtagccggacaggccgatctccttctgcagtttgcccaaacccagctgctccatgcgctgctggataagcgccagctcgggagcgccgatgaccacggtgttcagcgagggaaagcgcgagacaacgctctgaaccttctcggccgcctggttctcgatcgacggctcgctgaccacgagcacgatgatctggccggcgccgcgcaccttctgcaacgacgcaagcaaacgcgggagctcgccgggttgcgagatgggagtcgcgtgatcgtaggtcgtgagcacgctgccgccttctttgcggcgacgcgcggacacgaaagtggggatcacaataacggggttcatgcacgtccttcactcgggtacaactgcgagggctcggcccaaccccatattgtagcgatatacgccccgcagccttgtcaatccatcgaatcagtgaaggcgagctatttggtcatatattaaaagaaagcaggcgcggctcacgcgttccgcgcctgctttcccgctagcgggctactgccttcttcaccacgtcgaagcgcttgagcgcggagagcagcggaagccccaacacgtagatgaccagggcttcgccgagaccggtggccaccacgccgaacaggtacatgggcaggtacagcccgtcgagcgcgatagacgtgaacgggatggtgtagtagcccaggccttgcagcagaaggggtagatacgcaggcacgatgagcgcgttcgcgatcacggggcccagcagcgccagcttcggacgctcgcgcattttccagcaccacagcgcgccaaggaacgtggccaggctgccgaacaccacgtccagcatgcccagcgcccccgttccgttgatggcgagcgccataaggttcgcgatgatgcacccgacagtgaggccgggcacggccgccggcgtgagcactgccagcacgcacaccgcctcggagatgcggaactgcaccggcccccaagccagcccttgcagcgccaaaagcgtgatgagggtggcagccgcgtacacggccgcgatcatgcccgcttgggcgacgtacgtcgtcttcttgttcatggatatgctcctgttctccgcgcggcgcggtgccgcgggctttgggcagctagtaatccgcgagtgcagggcccaacgatgcaaacgcggagccgtcgacggatgcgagcgtgagtttcgcaaccggcaaaggccgaaaggaagtatagcagaggcgcggccgagggcgcacggtaaaagcacgaggggcgccgcatgtcgcaagcatcgaacacggggacgaaccgccctgcttgctatgcacgccatgaagcgctttttgcacaaaaacccgcgacgttcgataacaagaaggcccgaaagcgcgcccaagggtgcagctttcaggccttcgattatgcacgatgctctgacctggcgcttcacattatcgcgcagaagcctatcgcaagcgaacggtcagcgaaatcacacatcggcactttttgtgcgtagaagcgcgcggagcgtgcatcacgctggattctgcacggcatcgcctacgcgcccggactcctccttgcggcggtcgatcgcggcgcggcggatgcgaaggacggcgtagcccacgaacaccaccgagtacacgacgacggccatctgcgcaggagcgccgccgcgcagggcggagggcaccagcatgagcagcagatgcacgtacacgaggccccagaagggatacgccagcagctgcacgcgcttccacgtctccttcttcatgcgcttcttcaccacgttgaacgacgtcacccccagcacgaccagcagcgcgaacagcgccaacgcaagcgcaagcgccacggcgacattggtttgcggcagccccgtcgagaggttggccgcgtacgaggagaggtagatggccatgtgacccagcgacagcagccacgccatgatagacagctcggcgcggatgggacgcaggtacgtcgccacgcgcgagtcgcgcgcgaacaccccgatgtacatcacgacggcgaacagcgcggtggccagcgtgcacttgtgcaacagcaggaacagcgcgtcgtacagcatcggaggcagtcccgcgaacgagccgaccacgaacagcacgtcaagcgtggcagccagggcgtagaacgccatcggacacgacttgatgggccgcttgcatgcgaacgcgaatgccacagcgcccgcgagtaccaagatgagcgtcatgagcgcacctccataaccgtcaacgccagtgccgcgaacgcgcaatagggcttctcggccgcaagctcctgcgtgcgctgcatgaacgcagggagccacgcctgcgcgtgctcgcgctcaaacgtctgaatgcgctcggtccaagcagcgacagcttcggcatcgtcgcagttcagagcatcggcgagcttcgcgtacagatacgacagtaattcgaactcctcgaacacgctatcgcacggctctttgcgcgcattcttcgccaccacacccgcctcgcgcatcaagcgctccacatccagcgtcaccggcgtgcggaacagcgcaggaacgcctttcataccccgctccacgtgcagaaacgcgctttcgtacgggaaaatgggagtatggccgccgggtgccaggtacaggcgcgagtacacgatgcgcatgtcggccagcacgtcggccgtcgttgcgtcgcgccaaagggcaaacgattcagccactgaatccgccgttgccaggtcggtgcccgcatcgagcagacacgcccgggcatcgtcggcgaacgatccgtcgaccagcccttgcgccagacgctcatcgggatacgcgaacgcgcacgacagcaactcgaacgcatcggccttccccaccgcccgccttactacttcttctcgccccatgagtcccccttgttccgacatcttcgccccaaaaacacgccacagcgcgtgaggcgtgtttttggggcgaagatgcccccgtgcgccggggcctaaagggggcgatcccctttaggccgtcagcgccttattactgcaagtagtaaacgctcggtttcgtgccggcttcctcgttgaggaacatcgtctcgcgcccctcgatggccttcgacacgtccgactcgggatcgtccaggtcgccccagtagcgcgcgcggcccgggcacagctgcatgcatgcgggcacgtcgccgcggtcgatgaggttcttgcagaacgtgcacttctccaccgtgccgcccttgtgcggcggggcatcgtactcgcccaccacgacgtcgaggtagtactcggggctcttgatcagcgtgcgcacgccctcgtacgggcacgccttgatgcacgactcgcacccgatgcacagctcgctgtccaccgacacgatgcccgtctcctcgtccttggtggtcgcccccgtcgggcacacctcgaggcacgccgggttctcgcaatgctggcactgcaccggaaggaagctcatggtgcagttcggaaacgaaccgccggcattgtcgtttgcgaccgcccctcgcgcaaccgccgaaccgaacgttctcggatcgtcatcgcttttggtgtacaccacattgtacgagaggtctttcggaaggttgttcgccactttgcatgccgcagcacacgtctgacaaccgaagcagcgcctcaaatcgatagccattccatatcgagtcatgcgtatcacgccccctgtatcttctcgatggcgacagcaacgtcgttgtacgcctggttggcgcagcactggttatagtcgttgaaggacaggtcggagaaatgcccgtcgatgaactcgcctgcctggaagcttcgcggacaactgacggtgttcgggcgttgcccggcgttcagcgtggcgatcatcgtcacgaagccgcgatcgttgctcagcttgacggtatcgccctcctcgatacccaaacccttcgcgtcctcgggattcaaacgtacgatgggataaggctcgaactctttcatgtactcgacatcccaccactgcacatgagtgcgcgttcgcaagtggtcggagcatacgctgaacggatgctttgcgcgcgcgggactgttaacgtccgcttccaaagcgggttcccagtacaggaaggtcttgtccttcgactcatcgatttcctggccaacgttgtacgaaggaacgaccttctcctgatagaatcgggcgcgcttggagggcgtggtgaacgaaccgccttcgaaggaaatgtacgtctcccccggcaagaagcgcgccgctttctcttctttcagtttctcgaacgtgatccccaaatcgcgtgcggcatcgctatcgagccaaagcttgataaaatcctctgagtccatatcgaagaactcgccgtagcccattttctcagcgatcagcttgtatatctcgaaatcgggcttgctctcgtacaagggatcgataaccttatcctgccacaccaggtaaggcacgtttcggctcatcaccgccaactccgtcgtttcgaaccaatggcatgcgggcagcagaatgtcggcgtacttcgcggtttcggtgaacaccatatcctgcaccaccacgaactccacgtcttcgaacacgcgaagcgtttcctggcgctcggtttggcataccaccgggtttgagcaggacacgtatatgctcttcatcgtgtacggcttgcctgcaagcgtctccgtttgaagcactccgtgcacctggttccagttgaccgcgcggccgccgccttggacggggttcccttcggcatccttcggcttaagcgctccctcggtattggccacgttgccgccgccgccgatgctcaaacccgcaccggcacccggcttgcatatgtttccggttgccaagatgagagagtacataggcccgtagttgtaggtgctgttattgtagtggttgcacccgtattgcgaatacgtgtacacgggaccgtcctgcgcatacacgcgcgccagctctttgatgtcgtccaccggcacgcccgtgacctcggaagacctctcgacggtccactcgcccactttttccttgacgacgtcgtacacggttgcgtacgaggtgccctcgatcggaggaacgttctccaaagcaggtttcttcgcatctgcgaccgcgacgacggccccagcctcttcgtcccaaaccgcaggagggtcgatcacggtaggctcgcccgtcttaggattcacgggaccttgctgcggctccacccccaacgcactcaatcgcaggaacgtgccatcttcctggatgaggaatggcgcttcggtatggctcctcaggaaatcgagatcctgccacccctggtcgaacacctcgcgaagagcacccatggcaagcgcgccatcggtgccggggttgacgggaacgaaccagtcggccttggacgccatggtgttgtacgcgatatctatgtcgacaagccgcgtgcccttgtcgcgcgcttcgaggatgaagtgcgtcgtctgcacctgggagacggctggattcgaaccccagttcacgaaggtcttggcgttctcgaaatcggtctgctcgttgcccgattgccacggcgtgctgcccagcatcgccatcggacgctccaccgcggccatgtcgcgatcaggcgttatcttcgccgcgccgataacctcgcgcaggcgagacatggccgatcccggtgcggttccgccaccgcagatggcgcagttcccgctgccgatgaagaacgccactgcatcgggtgcatagtcctcggcgtatcctttccacttgtcggcaatttcctggatagcctcgtcccagctgattcgctcgaactcgcccgacccgcgctctccgacacgcctcatgggatactggatgcgctccgcactgtagacgcgcgcgacctgcgtcacccctttggggcaaattcgattgtatcgcgtatcgggaaaatcacgagccgtcgtgcgcactacttggccatcgcgcacgtgaacgttcaagaagcatccgctcaggcactgccctcgacacgcgcccgaaaagatctcgtcgggaacatagtctgcagccggctccgctttttccaggttctgggtttgggggctgcagcctaccagcgcgcctgccgccgtcagcgccgccgcacccttgatgaagctcctgcgggtgaacccatgcgttgcttgttcagccatgtgtgctcctctctttttcactcctcggccacaaggccttccgatgctcgcccttcgcagatggcggggaggggatcgcgctctgcgaagggcggggtgaaaagccttgttccccctggcctttcatgagtctcactttacggagcgccgaaggatattgcgataaatcggaaataagttttgcgttaaaaaattcttaaccgcgtattaacgccgctggtcaagaagcattttttactgcttgttcttcgatttcagccaaccatcgattaaccgcatcgaccgcctcttctaacgacatatccagctttgccgattcagccgctgcggcatagtcgatacgccaatgcggataggcggttatttgcgccggccacatgcgaaccggacggccgagctctttcgcttctttgcctcgcgaaaagaacgtatcgagtatcgcggcgtatatatcgcacacgtcgggcgaacccgttctttctgcaagatccttgaggagaatcaagtcgaccacatcgcgcggccgttcgttgcgaaacataggagggtcatggggctcggttgccgcatgcaccttttgggcgatctggtagctcaatgcaagacctaccaagtagtcaggcgtcggcaacccaaagccagcgagcttcggggctgccacgtgttcctgcgacgatccggcctgaccttcatcgggggaaatttctactttgattctcctccagacatcccctcgcaatgatagaaccatctcgaaccgtctcggcttcactatccgagagggaacacgtatgatctctgcgtccgtccgagcaaaatgcagcggcccccaaggcagcatcagctcggcgtcgagtgcagcaagaaaatcttcgatgtctcccgtgacgattccatccagatccttcgtggcgcgagcgcacaatcccagtcgatgctgcagaagcgttccgcctttgagagagaacctgcttgctcctgcgcaatcgataacttgctgcagcttcgctgcaacaaccgtcgaagctatgagccaagcgagcctgccgctttgccctatactcagttcgttttcagcatgcgctatccaagagtccaatacgcggatcgaacgtggctctttgcctttcggtttgagcgatgccatcttttccgaaaggacgaatcggacatccccctccgtatcatgcgtaccgcccatcgagttcaccttccaaacactgcgctatctcattggttagcaggcgtcgatccctgccgttttctatagcttggcgaatcagataagtcggcacgtccgttatgatgcattgttcgatagcgcacggcagggtgacgatgggtatctgatgccaccatgttctttgctgcggatccaatttctgacgatgaagcacatagccttcgccacccgctttcgcaatgcgacgccctttatctaccgtcatatgtatcttcgttggattgatgtcgctcactccgtatgcgtcgagcgcagtctcatggctgagcgccgcttcgggcactcccgtccagaggattgcccgcatgaaggcgccgtaccgcatctccggcacttgcggcacacggtaaagcccctgcgctacgcgctccaaacgattgcgcctggcaagagccgcaagagaatgtcgcgtgacaccctcctcctcggcttgcgccgtcgtgatgtagccgtattggtcgagggccacctctctgatcttctcagtatctgtcagcgtagttatcatgcaaaaatgttaacaccgtgttcacttttttgcaagcttgttgctccgcggaagccgaagccgcggcagcggctctcactccaagctgtcggccatcttgtagcccacccgctggacggtgagcaggtacttgggctcagaggggttctcctcgatcttctcgcggatcttgcggacgaacacggtgatgttgttcgtaggcttgcagtcggcgtccgactcgccccagatgtactcctggatctggctgcgcgtgaacaccttgcccggatgcgccgccagaaacgccacgatctcgaactccttcgtagtcagcgccaccggcttgcccttcacgcgcacctcgtattcgccgaaccgcacctccagctcaccgatgcgcgccacgccctcgcggttgcggcagcgggcgaaatcgatggtgtccttgtggcggcggatgttcgcctcgatgcgcagcagcagctcggtagaatcgaacggcttcgtcacgtagtcgtcgccgccggcgcggaagccgatgctcttgtccacgatgtcgcacttcgcagacaggaagatcaccgggatgcggcggccctgctcgcggatgcgcgcgcagaggtcgaagccgttcgtgcccggcagcatcacgtccagcagcagcaaatcgggatgctcgctggccagcagctccagcccgctttccgcatccctcgcgccgcagaacgcgtagccgttcgacaccagcagctgctcgagcgcttgccgcaggttgccctcgtcgtcgatgaccatgaccttatacatcgtcctccccctctatctcgcccacgatcgcgctcgcgggaatcgtgatgacgaacctgctgccacgaccgagctcgctttccaccgacacggcgaacccttgcatgtcgccgtattcgcgcaccagcgccaagcccaagccgctgccgttgtatttgcgcgtggacgtgctgtccacctgtacgaaccgctcgaagatgcgcgcctggtcctcgggcgcgatgccgatgccgtcgtccaccatcgacaacgtcaccacgcgcgcctcggcgtcgtacgccacgcgcagctcgatggagccgccgtcgggcgtgaacttgatggcgttgctggccaggttctccagcatgcgcgtcgttttctcgtagtcgccgttgaccaggggcacgtccgacgccaccttcgtgctaaacgacacctcgtacttgcgcgccagcggagccatagtgcccttcaccgatgccgccacgtcgcccaaatccatcggctcgcaggtggcgcgcatgccacccgcatccgaacgcgcgatgtccagcatgttgttgatcatgttgagcaggatgcgactgttcttctcgatctcctcccatgagcgacggtcgtgctcgttggccgggtcgcacgcctcgcgcgatatctgcgcgaacgtgatgatggacgtcagcggcgtgcgcagctcgtggttcaccatgcttagcaggtcggacttgaactgcgtctcctgcgccaggtcggcgttaagctgctccagcttgtcgcgctggcgttccagcagggcgttcgcctcgcgcaggtccaccgtgcgctcctgcacctgcgattccagatgctcgtacatgccccgcagctcgcccgccatgtcgttgaagccggcgatgaggctcctcacttccttcgcggcgaagcgctggctgacggacgcgcccaagcgtccctgcttcagctcgccgaacgccgcgtgcatgccgcccaacggccgcagcacgaacacggtggtcaccaccaagatgaccaagccgatgaacacggtgatcagcaggaagtacgccatgtctcggatgacgttgccgcgcatggccgcctgctgctgatcgagggggatcacgatgctgatggccccgccgaccgactcgagcgtccaaccttccttcgcgtggtcggtgatgtcgagctcgccgaccggctcgccgtggcattcgaggcagctgtcgtccacttcgagcgcttgcagatagcggaacctgtcctcgccgtcgaacggggccacgccgtaatactcggtcaccgaacgatcggcgttgaacgcctcgagagccttcgtctcgaactcgtcgggaatgtcctgctcgctgcgcgggtcgaagttcgtgtaccggatgcggtagtcgctgcccgccgagaacagccggccgacgctcttgcccaccaccgagcagtgcaggcccttgaactcgtagccgccgctggacgaattgttgatgatgctttgggaattgtccatgaactgccacaccgcgtccatctcgcgcgcgaacgtgcgcgcttcctccagcatggcctgctcggtctgccgctgctgcgagtacaaatcgaacgcgacgaacgcgaaaaacgacacggcgaacaccgccgtcagagcggcaagatagatggtcttcagactgaaagcatgcttccccatgagcgccccctacgctgcgttcggaaaaattcgcagcgtgcaagcaccgtagcataatcgtctgatcgaagcaaagctgcaacgagcaatcagcgacctggggaaacacacgcattcgcatcgctcatctggctattatgatctcgttgctcaaagagcgaaaacctcagcgcttcttgcgcggcctgccctttttgggagtttttccccggtcggaggctttttcgccgcgcatgcggcgagcctcttcgcggcgcgcgcgcaggtctttcgtctcctggcgaagcgcctggtacgatgcgtagcgctgttcgctgatatcgcccgactcgacggcggcgcgcacggcgcatcccggctcgtcctcgtggctgcaatcgcggaatcggcagcgctcggccgcctcctcgatatccgcgaacgctgcgccgatgccggtatcggcctcccacaggcccagtccgcgcacgcccggcatgtccatgatgaagccgccgccgggaatagccaccatctcgcggctcaccgtggtgtgccggcccttgccgtcgcggtcgcgcacgggggttgtttcttgcaactcgtgtcctaccagcatgttgatcaggctcgacttccccacgccgcttttgccgatgagcacggccgtggtgttcggcggcacaagcgcgcgtaccgcttccacgctggaaggatcgtcggccgacacgacgacggtctgcacgtcggggccggccaacgcgcgcacgcgatcgcgcaccgccgccacttcggcatcgctttcggcgagatcggctttcgtcagcaccacggtcacggccgcacccgtctcgtaagccagcaccagctctcgctcgagccgcctcacgttcacatcggatagcggttgcgccacgaacacacggtcgaaattcgcagccagcacctgcgggagcgcgcgttcggtgggatctttgcgcacgaacgcgcgcgtgcgcggcaggatactctcgatgatgcccttgtcgtggccctccggcacggtcacctcgacgaagtcgccgatcacggcacgcacttcctcgcctttcaccagcgcggtggcatgctcgcaacgcacgaacgacccctcgtcggtgcgcacgagcggatatcctcgatcaagcttgacgacctggcctctttgcaaaagccctccttcgagtcacgaacagcgcgcctaccgctgccgttccctcagccaatagaacacgcccagcatcaccagcccgacgaccaccacgacaatgcccggaacgaacgcgttgaagtcgaactcatcgggatggcgctcgcccggcgcgatgacggtcaccgcctccgcatgaaggtcgctctggccttcatgatcggcgcacacgagatggaacgtgccacgcacttgcaagatggtgcccgtagtaccatactcgccgaacgtgtcgatcttcgatgccgattcgttgctcatatacaccgagatcgtcgcagaatcgccctgagaggaaagcgtgatccaccgatgcctccccgacacgccggcacggatgctgtcgccgatgacctcgcctgttacctgcacggtctgattgtcgtaataggcatcggcgccgctgaggtcgacgatggacgtgtcgtagatgaacgagctgtcgggcagctgctgcgtgttcaccgcgttgtcgccctcggcaggctcatcggcatgcgcggcagccggcagcgcaaacaccgccgcaagcagcacggccagcaccgcgacgaaactcacgaacgcaatcggcagcggcagcggttgacgggttccccacctcatgactttagcacccgccttttcggattgagcgacacgatgatctccgccaccagggccaacagggtaacgaattccagacgacctgcccacatctgcgcgatgtagaagagctccaacgacggagacatgcccggagcggcaagccccgacgacacgccgccgttgctggccatggccaccgattcgaaaatggcctgcggcgcctcgtagccatgcgcgatgcccaccagcgtgcccaccgcgtacgtggccacgtacagcacgaacaccgtcatggcctccttcacgacttccggtgaaagaatgcgccggcccacatggttgtacgacaccacgacgcgcgccgaatcgggcgcaagcgcctctttgatggtggcgatgatggacttcatgatgatgcccatgcggctgaacttcaagccgcccgaagtggacccgccgctgccgcccacggccatgaggatggccagcacgaagaacgcgcccgacgacagcgcggttgtcagctcgttggtggtgatgttctgaaagccggtggtggagaacgccgatatcaccatgaacagcccgcgtcgcaacatggcaggcagactggaaaactcggggcttgcgctgagcgaggctgccagcacgcatgtcatcacggccaaccacagcaccatcgtgcggatttccagatcgcggaagaaaacctccacgtgtcctttccacatttcggagtgcagaacgaagttgatggagcccagcaacataagcaacatgagcacgatctcgagcgggaaccaatgatagtacatgacgctctggctcataggggcaaagccgcccgtggtgaaacccgagatggccaaccacagcgattgcaggaacgcgcgcagcggttccatgccgaggaacaggcacatggccgtgagaatcaccgtggcgacaaagatcatgcccatgccgatcttcgcgatgaactgcgtggtctgcacaacgttgggcaccacatgttcgctacgaccctcggacatgtacaggctggctccagcgcgcttgccgaacaaaccgaacgacaacgccaccacgataagaccgaaaccgcccaacaggtgcatcatgaaacgccacatgttgtcggcgttcgacaggtgatcgagatcgacgatgacgctggcgcctgtggtggtcagacccgacacgccgtcgaacagggcatcgaggtagctgaggtaatggcccgacaggtacagcggcaccgccgccacgaacgcgagcacgatccacgcgaacccggtaacggcgagcgcctgctggcgattgagccgacccggatcgatgcgcaggaaccgcagcgccgatccgacgataagcgcaatgccgatggtcagcagatagtgcgtcgcaggagtccactcagcgcacgcaagagccgtgacgaacggcaccagcagagcaaggctggagaagagaacgagcacgccgagataatggccgatgacccgaacgtcgtacaatgtgaaccgttgccacattctgcgtctacctttgcctcgaaccgcgcaaacgggcgagtgtttcgatgtcgatcaacccagcacgatccttaccaagatgataagcgcccacagcagcaacaggaagcacgacagcgacagcagcaccacgctgtaacccagcagcggcgtctcgatgacctgtcggatgtccttgttccttttgcgcatgcgggtattctagtacaaatggccgctgtgcgatacgcccggcgcggcaacagacacaatgatgatgacttgggcgccgcgaggctcgcaggaaggccgttcgacgctctccataataaagtttacacgcgtagctatcgaagcacgcatgagcaaggtataatcccaccattctttgatcattcgatcaaaaaacgcgaagaggaacgagaaaggtacgatcatggctcctgaaaacgacatcgattactcgctgtcgcgcgttcctgatgaagcgaaacagccattttggcggattcttttcatcaggatcggcgcgatctgctgcgtatcccagctcatgttgggcgcggcactaggctacggcctgacgttctgggatgccttcctagcaaccatgctcggctcggtgctgcttcaggtggtcagctgggcgctgggcacggcggccgcgcgcgaaggcttgtccaccagcctgctgtcccgctggaccgggttcggcaaggtaggatccgccctgttcggcggcgtggtggctatctccatggtgggctggttcggcgtgcagaacgcggtgtttggccagggcatggctgaaatcgtcccgttcacagatttcctcggcacgcaggagatcctgcccggcatcatggctggaatcacgcccgagtacatcttctgggccatcatcaccggcctgggcatcacgctgctcgtggtgttcggcatcaaggccatcgcgaacttcgccacggtgttcgtgccgttgttcgtgatcgtggtcatcgtagccgcagccatcatcctgcagaaccattcgctgaccgagcttctcaccacggcccctccgggaccggcgctgtcgctgggcgcggcaaccaccatggtggcgggcggcttcattgcgggcgctatctgcacgcccgactacgcgcgattcctgaagaacggcacccaagtgttctggatgacgctcatcggcacgttcgtgggcgagctgggcatgaacctgcttgccgtgctgctggcgcacgccatgggcaccgagaatatcgtcgacatcatgatgggcacgtcgggcatcatcggcgtcatcatcgtagtcgcctccacggtgaagctgaacgacatcaacctgtactcgtccagcctgggcttggcaaccatgatcaacgcgctgttcaacaaggccatcagccgcaacggactcgtgtgggcgctcggcatcgtgggcacgctgctgtcggtcatcggcatcatcaactacttcactaacttcctcacgctgctgggcgtggccatcccgcccgtcgccggcatcatggtggtggactacttcatcttgaagcgcagccgcgcgacgcttgacgcttcgcgcgccaagggcgagctgcccgagaaggttgagaagtggaaccccatcgccatcgtctgctggatcgccggtttcgccgtgggcgaggtcaccagcatcatgaacgcgggcattccgggcctgaactcgctgatcctggccggcgtgctgtactggatcgtgatgaaggtgtacgcctccatgaagaaggtggacaccgttacgttcacggaaacggaccaagtgctgtaaggctcgccgcgatgcggtgggtgtgggcggggcgaagcggaagcacaccccaccgccgcgaaaaccccgatcagcaatgcgaagcccctgatcagcaatgcgaagcccccgatgtttcacgtgaaacatcgggggcttcttcgttattccagatcaaggccgttgtcctcgcaatacagagcacatgatgcaagcaactcgtcaaaatcatgttcgatgacggcccatagtatctcgcgatcgacatccccgtaagcatgtgcgagacgattcctcacacccagcactgcatgcttttcgaacccatagcgctgcgatacctcgtcggaaagccgtccgacctcctcagtgacacgcatcacgcgattcatgatgccttctgcgatcagatcatcttcgtcattgtcaggatcgcaaaattgagaacgagcgaactcgagcgcgcgcagctgacgcttggtctgcaagattatgtcgtgaataatctcctgaagacgggatagtcatcgcgcttcgcgttcataaaccagctccttgtccctctctatggccgcagccaagccctcctttttgatacgatcagtggaaaccacgtcgacctcgcgcccggtagcctgctcgatgcgcttcccgaactgcgacacatcatgcaagttgaaggacatgccatggtcgtattcgatacggacgtcgacatcgctgtccgaaccgaacgtgccccgcgcgaaagagccgaacaggtacgcgcgctcgattgcgggaaactccgaggcagcttgagcaacggcttcgcgcacgaaagaagcctcctcggatcgatcgccacttttttccaacagcatgcctttgatctccgaaagctgctctttgatttcgacaagctgatccaaacgaagctccccccgctccgcatccatccccctgcgaagaaagtgaaggaaagcgtccgtcttgctcatccgattttcgctcgcataccgatccacagattcgaccacctgaacgggaagccgcagcgacaagggcacgcgcttcggcgcactcgaattggaatcggtttcgaaatagtccatgctcgcctccgttcgtacgccgatcatgaggtcactataacaattttgtattgcaattgcaatacaatcagtttcggcaagcgacttgaagggaaaggcgcgaagggcctacggcgaggaaccttatccatactagcgagagccttcgccgcgaaatccctgttcagcaatgcgaagcccccgatgtttcacgtgaaacatcgggggcttcttgctttgcggcgacgtcttcagacgcaagatcctgtgtcgggcttcgttttatgggagcagcaccagatcgtaaaggtcggggcgacggtcgcgcaggtaggggctgcgctggcgataatcgaccacttcgttcaggtcgagctccacatgcagcaccccttcggcctcctcggccaactcggccaccacatggccgcgcgggttgcacaccttcgtgtggcccggcatgaccagctgatcctcgacgccgtaacggttcacggccgccacgaacgcagtgttctccagcgcgcgggcgggcgcgttcacgtcccacacgtccatatcctcctggcaccacgccgaggggcacaggataagatcagccccctgcagcgccagcatgcgcgcgacctcggggaagcccatgtcgtagcagatcatcacgccgatgcgcccgaagtcggtgtcgaacaccgggcagtcgcagccggagcggaagtagaagcgctcgagcgcccacagatgctgcttgtcgtacgtgcccagaagttcgccttggcgatcgatgatcaccgagctgttgaacggtacgcccgccatgtcgtaggtcaaggcgaggcccgccaccacgtagcagttgcctgcgcgggcagcgtcttgcagcgcgcgcaccgtggggccgtctaccggctcggccagttcgggcacgtgcgggccgacgatgttcagctcgtagcctgtagagaacagctcgggcaacaccacgaggtcggcgccttcggcagccgcctcggcgatcatccggcacgccttttgggtattcgctgccggatcgcacagcacgctctcgaactgcaccagtgccaaatgcaccgtgcgcgcgccagccgcttgtttcgtttcggtcatgggtttctccttcaacgcctcaaaccgtttcgctgcattatctcatgatcaaagcgccttgcacgccctcagttggaccggcgctagaaacgcgtcggaataccgggcaaggtacgtagaaatagcattggaaccgcgtggaatctgtgcgagattcgagcgactttcgatagtgatgcgcgccatcgagacgtaagacgagctgcctatactatatagtgcggatgcagcgaaggcggcgcggtgcctctccccctcataattttgatggatggaggtgaagaccgtgaccgcttgggattttatggtgctggctagtgcgcttttggagtttgtttctcgcgtcatcgagcttattttggtgataaaagaggcgctcctaacccatcggggaaaggagcgcaaacactaaacccaaaccgcctgagcgatccgatagccgtggggagtctagcccctccctgcggcttacctcattatacaagcaacgcgtacgcgagccaaggcaacgacgaaccgacaaaaatcagttaaagcatcagatcgccgacggctttgacgcggatgcacagcgcatcgcccagataggccatcgggatgtcctcgacgtcgaccacttccacggtgctcggatcggcgccggcttcgatggcctcgtcgcacgcgcgctgcttcgactcggcgagcgcctggtcgcgcggggtctcggtcagcgagaacaccttggcgatctggccggacacctgcgcgatggccgaacccactgcgttcgccacgccgaagttctcagggcgcagcacgttgtccgagccttccagctgatcaggagccagaatggagccgccgcccacgaggatcaccgtcacatcgccggccgaggtcttcatggcgtccaccgcatcctcgatgatgcgcgtgatctcgacataggccgcgtccacgagcgccgggtccaggtcggccaccagtgcgggatcgcccacgccctcggccaggcccttcgccaccacgatatcggtcgcggtcagcgtgtcgccgccgaagcaccgcgccttcttcgtgaccaggtagcccacgctgtcggggcccaccgtcatgctgccgtcctccagctggcgcacgagcgagccgccgccgaggcccaccgacaccaggtcgggcatgcggaagttcgtgcgcacgtcgccgatttccacggccaccatgctctcgcgcgggaagccgtgcgccagcacgcccacgtcggtggtggtgccgccgatgtcgacgaccacggcgtccttctcctgcgtcaagaacgacgcgccgcggatggagttcgtcggcccgcacgcgatggtgaagataggatagcgcttagcatagtccacgctcatgagcgtgccgtcgttctggcccaggtacacggccacgtcggtaaggccctcagacgcgagcgccgcctcgaagctgtcggccgtcgtgcgcgccacgtcgtacagcgccgcgttcaggatggacgcgttctcgcgctcgaggaagccgagcgacccgatctccgacgacagcgtgatggggaagccctcgcccagctcctcgcgcagaacggcggcggcgcgcttctcgtgcgcgtcggacaccggcgagaacacgctggtcacagcaacggactcgaagccctcttcgcgcacgacgcgcgcgacctcgcggatctcgtcttccgacagcgcgctgatctcgcgaccgtcgaactcgttgccgccgtgcacgaggaagtcgcgcacgcgcatggcgttcttcagctcgtcgggccagtcggccatgcagctgatggccgtcgtggccggggcgcccacgcgcagcgcggcaaccttgttcaggcgcttgcgctcgacgatggcgttcgtgcagtgcgtggtgcccagcatggcgaacccgatgttgcgcgccgcgtcggcaccgatctgggtgatcacctcgtgcatggcggccacgatgccgctcatgacgtcctcggtggtggggcttttcgtcgcggccaccagcttgaggtcgccgtcgatgaccaccgcgtcggtgttcgtgccgcccacgtcgatacccagacgccagatgcgcttctgatctgccattacgcctgcacctcctcgttgttcatcgcggcgacgcgctgctcaaccggcacgtagtcgatgtcgtagccgaacgcgcgcggccccaccacggccaggccctcgggcgtgcgccactgcggcgcgcagggcatgcccaccaccacgatgcgggcgccgtacttcaggccctcggtagtcacgggcgagccggactccatgtccagcgacatgatgaggtcgggcgacgtggtcaccggctggccgtcgcgcagcgcgatgaggttctcgttctggaactcgatgatcagctggctgcccttgtcctggtcgagcccgtccaccacggcgcgaccgcgcacgaacatgccgtcggtcttgcgctcgacgtccaccactttgccgcggaacaggcgaaacccgttcgtcacgttcagcacggcctcgatggggtcggcatgctgctcgcgcgcctcgcgcagcgtgcggccgatctcctcgcacagcgtgggcgtgtcggggatgcagtagtccttgagctggcgccccgtgcacggatacgacgccaggatggtgtagccgcccatcaccgacgtggcctggcgcgagatgcgctcgagccacttgtcgtcgatcgcgcgcaccgtgaccgtgttgcccttctcgtcggccatgacggcgggctgccccttcacgccgttgatgcccagcgtggtcatctgcagctcggggaacgcgcggcccatgagatcgcagtccaccacggggatgcggcgcgtggccgccaggatgaacgggatggtggagttcacgccgccggcttccaccgcgtagatggcgtacggctcctggcccagctccttcaccagctcgtcgtacgtggccatgggctccaggccgctgcagatcttctccaccatgatggtgggggcgcccatcatctgggacacgcacaccacggcgtcgtcaggaacttcgtcgggcgagatgagctctacttcgccgtacttcttgatggcctcaatggccatgagcttgccgacgtacgggtcgccgcccccgccggcgccgagaaccgtcgcgccaagcgccatgtcctcgatctctttgatgccgattttccttctcatgatggaatggaacctttctccatatgccgctgcttgaacaatctatacgttggattgtactggactgcccttgcgactggaatgccgaaacggcgatgcaccgaaatgccgcacgtttgccgctcgctgcatgagcaagagcatcccgtaagggcttttgtcctcgcaagatgttttcattgctttcatttttgctttcatccttgcaaaatgctttcattgctttcatttttgctttcatccttgcaaaatgctttcattgctttcatacttgttgcaagcaattgcgagcgaaccaggaggtacggactcgatgaaggaagacgttcattcgttcgaccttgctgaaaccgtcgagcgcatgcgcgcagcaggcaccgatcttcaatcgtgcgaagtgaagagcgcagtcggcaagctcccgaaagaccttgccgaatccgtctctgccttttcaaacggctcgggaggcatcatcgtgttgggcctttccgaggaggagggattcaagcccgcgcccggatttgaccccaagcgcgcgcaagatgccctggccgaagcatgctacacgaagcttacccccgcgatccgaccgatcataagcatcgagacgtttgaggaagcgcccgtactcgtcgcttcgattcccgagcttccccctcgcgacaaaccttgccatgtgacgacgagaggaacctacgaaggctcctttatacgaactggagatggcgatagaaagctaagccattacgaaatcgaccgcttgatcgaggagcactctcagccgcgtcatgatgcgcgcatcgtcgaaggggcaaccgaggacgacctcgacaagacgctggtcgactcgctcgtggaacgcgagcgattcctgcatcctcgcattttcgagaaacttgggaaacaggacatcctgaaagccttgcgcgtactggacgaggacgaaaacggggttctgcgaccgacacttgccgggttgctcgccctcggattctatccgcagaagtactttccgcgccttacggtgtcgttcgccgcatatccaggcacaaccaaagcaacattgcaggaaaccggccagcggttcctcgactcgaacgatttcgtagggcctattcccgtcatgatcgcggaagcggtttccgccgttgcgaagaacatgcgaaccggttcgttttttgaaggagcgtttcgcgaagacgtgcccgactaccctcaagaggccgtgcgggaggccgtcgcgaacgccctcatgcatcgcgattactctccggaagcctggggatcccaagtgcaggtcaatttgtacgcagatcggcttgagattctcaatccgggcggcctgtacggaagcgtaactgtcgacacgttaggaacacttgggctgtcctcaagccgaaacgagtttctatccaagatactcggaagcaccccgtaccctcaagcacccggcaaagtgcgctatgtcgtggaaaacaaaggatccgggtacgtggaaatagcatcgcaattggcggccgcatacatggagccgccaaaacctcatgatcggcccggatcgttctcgctcacgttctgcaaaaggcgcctgaccctcagcgaacaacacgattactcgaacgagaacatcgagaacgccatcctcgccatggccaccgagcacgagaccgtcagcgcaaaagaagtggaagaggcatcgcgcttatcgcgcggaaccgttcttaaacacatcaataacttgattcgccagggatcgctcgaagcgacggagccaggtagcagcaggaaaaaacgatataggttgacgcatccccgataacggacatcgtgttcgccccaaccatcgacaagaaaagggagcaccccatgattttcaaacagttgatcgaactctacgacctgttggactcgcccgctgcaagcggagcgggcgtggtggagtacctgcgcggcatcgaccccgcgtgcgatgccgaaacgtacgtgctggaggggccgaagggctccaccgatatggtgcgcgtgcgcatccccggttcgcgcgggcgcgccgccggcggcgaggcgcccaccatcggcttgctgggacgcttgggcggcttgggcgcgcgacccgagcgcatcggcttcgtgtcggacggcgacggcgcattgaccgcgctggcctgcgcggcgaagctgctgtcgatgcacgcgcgcggcgacgtgctgccgggcgacgtgtttgtctccacgcacgtgtgcccgcatgcgcccacgttcccgcacgaaccggtcgcgttcatgggctcgcccgtggccacggccgacgtgaaccgcgaggaggtgggcggcacgcagctggacgccgtgctggtggtggacacgacgaagggcaaccgcatcatgaacgaacgcgggttcatgatctctcccacggtgaagcagggctgcatcatgcgcgtcagcgaagacctcgtgtcgctggtggaaatagccaccggccgtcgcgcgcgcacgtacccgctgtccatggccgacatcacgccgtacggcaacgggctgtaccacctgaactccatcctgcagccgtgcaccgccaccgacgcgcctgtcgcgggcgtggccatcaccaccgagacggccgtacccggctgcgccaccggcgccacccacctgaccgacctggacgaggcggggtcgttcatgatcgaggcggcgaaggcgttcggcgaagggaagtgcgcgttctacgacgaagacgagtacgcccgtttcgtcgaacgctacggaagcatggcccacctgcaaggcatgggcgtcttgcccgccgaggatccggaggcgtaagcgctgttcgccatcccgaacacagtacgcgggtcgtcatcccgagcgaagcggcgaaggcacgaatgtttcacgtgaaacatttcatgacttgaaaggttatcctatggatctacagcaacgtgcacgcatcattatcgaaacgaatcttgcgcttcagccaggcgagacgctgctggtcgtcaccgatgaccccacccgcgaggtgggcgagctgttctacgaagcggcacgcgccatggatcatcgggctctcatcatgcagatgcccgaaggctcggtagccggcgaggaaccgcccgcgccggtagcggcggctatgaaggcggccgacgtcgcactgtgccccacggcgaagtccatcacgcacacgaacgcgcgcatcaaggcagcagcggcgggcacgcgcgtggtcaccatgcccggcattaccatggacatgctgcgcgacggcgccgcctgcgccgactacgaccaggtggagcgacgcacccgccaactcaccgagcgcctgacgcacgcgaagcatgcgcgcatcgagaaggatggccatgtgctggaacttgcgctgacagggcgcgacggcgtggccagccccggcgtgtaccgcgagccgggtgccagcggcaacttcccctcgggcgaggcgtacatcgcaccgctcgaagacggggcgaacgggacggtcgtcatcgacggctcgatggtgggcattggcacgctgaccgagccgatgacggtcaccatcgagaacggacgcctcacgcgcatcgagggcgccgacgcgcagggtccctacgccgaacgcctcggcatcctgttcgaccaacccgagaacggcaccatcgccgaactcggcatcggcacgaacgaggccgcgaagctgtgcggcatcatcctcgaagacgaaaagctctacggcaccgtccatatcgccttcggcacgaacacctcgttcggcggcatcaccaaagcggactgccacctcgacggcatcatcctcaaccccaccctctacctcgacgacgaatgcatcatccgcaagggcgagttcctgtagcgaactagcaaccctccgcaaccgcctgggttgttccaagtgaaacactcctgcggacggggcggtgaaacggggcgcggagccgacggatcggcgccgcaacacgtaaacggcccggcaaatgccgggccgtttacgtgttgcgaccttgcgggaagccgcgctcgttctgtccagacgacttacttatcgccttcggtcagcaggtcgtcgaggggcatggcgtccagctccaggggctcttccacggtgcattcgtagttgccgtcctggtcgatgctgatcagcacatggctgcgatcgcgcagcttgccttccaccaccttctgggcgatgcggtcgacgatctccttttggatgaggcgcttcaacggacgcgctccgaagatgggatcgtagccgtcgatggacaggtgctccatcgccgccggcgtcacgtcgagcgtgatgcggcggtcggccagacgggcgcgcacctcttccaactgcaggtcgacgataggctcgatgttcgtcatgttcagcgcgttgaacaccaccacgtcgtcgatgcggttgatgaactcggggcggaacgtcgcgcgcagggcgccgtcgatggcctgcttcatggccttctcgtcgccatgctcggcgaactcgcggatgaattgcgagcccacgttcgacgtcatgatgatgatggcgttcttgaacgacaccacgcggccctggccgtcggtcaggcggccgtcgtccagaacctgcagcaggatgttgaacacgtccgggtgcgccttctcgatctcgtcgagcaggatcaccgaataaggcttgcggcgcacggcctcggtcagctggccgccctcgtcgtagcccacgtaccccggaggcgcgccgatcaggcgctgcaccgagaacttctccatgtactcggacatgtcgatgcgcaccatggcccgctcgctgtcgaacaggtactcggccagcgccttcgcgagctccgtcttgcccacgcccgtggggcccaggaacaagaacgagccgatggggcggttcgggtcggacagcccggcgcggttgcggcggatggcaccggccaccgaggacacggcctcgtcctggcccaccacgcgctcgtgcagcttgtcctccaaatccaccagcttggccatctcgccctgcatcatcttctgcacggggatgcccgtccacgtggacacgacctcggcgatctcgtcgtccgacacctcctccttgaggatggcgccgtcctgctgcttcacgttcagctcctcctcggccgcatgcaactgctgctgcagcgcgggaatgcgcgcgtagcggatctcggacgctttcaccaggtcgccctcgcgggtggcgcgctcctcttcgagctgcgcgccctcgaggtcggacttgaggttctgcacatgctcgatggcgtccttttcgttctgccactcggccttgcgcttgtcgaggtcctcctgagccgtggctatctcgcggcgcagcgcctcgaggcgctcttgcgaggcctgatcgctctccttcatgagcgcctgctcttcgatctgcatctgggtgagcttgcgctcggcggcgtccacttcctcgggcatggagtcgatctcgatgcgcagacggctggcggcctcgtccatgaggtcgatggccttgtcgggaaggaagcggtcggagatgtagcggttcgacagctcggccgccgcaacgatggccgcgtcggtgatgcgcacgccgtggtggatctcgtacttctccttcaagccgcgcaggatggcgatggtgtcctcaaccgtaggttcggtgaccagcaccggctggaaacggcgctccaacgcggcatccttctcgatgtacttgcggtactcgtccagcgtggttgcgccgatggcgtgcagctcgccgcgagccagggcgggcttcagcatgttgcccgcatccatggagctgtcgcccgtggaaccggcgcccacgatggtatgcagctcgtcgatgaacaggatgatgcggccctcgctctgcttcacctcgcgcagcacggccttcaagcggtcctcgaactcgccgcggtacttcgcgccggccaccatcgcgcccaggtcgagcgccacgaggtcgcggtccttcagcgacgagggcacgtcgccggccacgatgcgctgggccaggccctcgacgatggccgtcttgccggtgcccggctcgccgatgagcacggggttgttcttcgtgcggcgcgacagcacctggatggtgcggcggatctcctcggagcggccgatgaccgggtcgagcttgccctcgcgcgccttctgcgtgaggttttggccgtactgctcaagcgcctcgaactgcactttgttctgctggtcggtgacgcgcgtgtcgccgcgcagctcctcgtaggcagcctcgatgctcttgcgcgtgacgccggccgtagtgaggatcttgcccgcggcgcccttctcctcggacagcgcgatcagcagatgctcgctggtggcgtagctgtcgcccagcttctcggcgatcttgacggcgttgtcgatgaggttcatcagggccgggccgggcacgccgctcatcatgccggggttcccgctgaccttcggcatgcgctggatctcggcatccacgttggcctgcagctggaacggctcggcaccgatgcgcttgatgatagcggacaggttgttctctttcgattccagcagagccttcaacatgtgaatgggctctgcctgcgatgactcgttctcggaagcgatgacaatcgtctgttgcagcgcttcctgagcggtcagggctagcttgttcaggttacccatgttcatacaacgttcctccttcgcttagggcagctgccgcaaagcagtcggtaagtcggatacgcgcacgagggcgttcacgctttcgcgcgtttcaagctcgtgcacgcgatcggccagacggcgcacgcgcttgtgcaggtcgtccagctcggtgtcgcgctcctccaggcggccctggaggtcgagaatgcggatgacgcccgccaggttgatgccctcgctcgtcagctcgttgatcagctcgagccgctcgatgtcggccggcgagtacatgcgggtgttgccgctcgtgcgctggggcgatacgagccccttctgttcatatgctcgcagcgtttgcgggtgaacgcccgccagctgcgcggccacgctgatcatgtacagcgggcggttgcggtcggttcggtcgctcatcaccagctcctcacatcatcggtcgtagccgctaaataatcttccatggccttcttctggccttcgttcatctccttgggcacgaccaccttcacggtgatcttaaggtcgcccgagccgtcgcccttcaccttgggggcgcctttgcccctcaccgacagcacggtgtcgtcctgcgtgcccttcggcacgcgcacgcgcaccttcgtgccgtcgggcgcgggaaccaccacgctggcgcccagtgcagcttccgccacgctcacgggcacgtccatcagcacgtcggcgcctttacgagtgtagtacggatgcggatcgatcttggtggtgatcagcaggtcgcctgcagcaccgccgttctcgcccgggccgcccttgcccttgaagcgcaggcgcccgccgtccacggcgcccgccgggatcttcacggtgagcgtctcggactcgccgcgaccggggacacgcacggtcacgcgcttctcggcgcctttgaaggcctcgtcgaacgtcacgttgagggtgacgttcatgtcctggcccttgcgcggacgcggctggcggccgcccccgaaaccggacatatcgttgaagtcccagtccgttccgaacgcgccttcgccgtggcggatgctttccaggatgtcggcccagctgccgaagccgccgcccgcgccgccgaagatgtcctcgacgttgaccgagccgccgccccagccctgggggatctggttctcgttcgccgtgccgtactggtcgtagagcttgcgtttcttgtcgtccgacagcacctcgtacgcttcgttcagctctttgaacttcgcctcgtcgccgccggcgtcggggtgatgggtgcgcgcgagcttgcgaaaggccttctttatctcgtcggccgtcgccgtgcgtggaacgcccagcgtcttgtagtaatcaggagtcgccgccataaaacgctccacctcctcaatctatcgagtaaaccaaaagcgggcagcctcttggccttgcccgctctggtcgtttgcttttacttttccgcgtcttcctgcggtttctcccgtttgggaccgccggaggtgacggttaccattgcaggcctgagaactttcgttcccatcttgtaacctcgttggtatacctcggacaccgtctcgtcgggcacgctggcatcgtccaccgtggccaccgcttgcgcttccagcgcgtcgaacgcttcgccggccgggtcgataacctcaacgccgtccttcttcagcacgtcgacgagcttcgcatgcacggcctttacgccgtcgaacaggccgccttcgccgttcttcgtcgcgtagtcgatggtgcgctcgaagtcgtcgatgacgggcagcaggctggtgaccagcttctccgtcgcgcgcgccttctcgacctcgcgctgctcggtggtgcggcggcgatacgtgtcccactcggcgtgcaggcgcaggtacttgtcctgccaatcctgggcctccgccttggcctgagccacctgctcgtcagccgaagggccggcgtcttcgatgacctcggcctcgatcgcctcgccttgcggcgccgcttccgcggcggcagcgtcggaagagggggtttccttgctgccgctcgcgtcggcgggccgggcctgcggctgggctttcgcatccgcaggacggtcgtcttcgatgggaatgctcttgcctgcgccttgagccgcgcgctcgggcgtgggctggttgggctgggccatagcgattacttcccttccttcttgtcgtcgtcctcgacgacctcgtagtcggcttcgatggtgtcatcggccggggtggactcggcggcagcggcctgcgaagcggcgtccgggccctgcgtggagtacacgacctcggccagcttgtagcccgcctgctgcatcttctcggtcgcggccttgatggcgtccatgtcggagccctcgagcgcctgcttcgcctcggcgatggcctcctcagcggcggacttcacgtcggccggagccttgtcgcccacttcctggagcgtctgctcggtggcgttcaccaacgcgtcggcgttgttgcgaacctcgatctcttccttgcgcttggcgtcttcctcggcatgggcctcggcgtccttcaccatgcgctcgacctcgtcgtcgttcagcgcggtggagccggagatggtgatctgctgctgcttgccggtgcccaggtccttcgccgacacgttcacgatgccgttggcgtcgatgtcgaaagtgacctcgatctgcggcacaccacggcgcgcagccgggatgccggtgagctggaacttgcccagcgtcttgttgtcggaggccatctggcgctcgccctgcagcacgtgcacctcgaccgacgtctggttgtcggacgcggtggagtagatctcggtcttgcgggtggggatggtggtgttgcgctcgatcatcttcgtcatgacgccgcccatcgtctccacgcccagcgacagcggggtcacgtcgagcagcaggatgccctcgacgtcgccggccagcacgccgccctggaccgccgcacccatggccacgacctcgtccgggttcacggacatgttcggatccttgccggtgagcttcttcacgaggtcctgcacggcgggcatacgggtggagccgcccacgaggatgacctcgtcgatgtcgcccgtcttgaggccggcatccttgagcgcctgctcaacgggcttcttcacgcggtcgagcagatccttcgtgatgcgctcgaactcggcgcgcgtcagcgtgtagtcgaggtgcttcgggccggaagcgtcggccgtgatgaacggcaggttgatgttggcctgcgtggtggaggacagctccatcttcgccttctcggcggcttccttcaaacgctgcagagccatcttgtcctggcgcaggtcgatgccgttctcggcctggaacttgtcagccatccagtcgatgatgcgctggtcccagtcgtcgccgcccaggtggttgtcgcccgcggtggacgcaacctcgaacacgccgtcgcccagctccaggatggacacgtcgaacgtaccgccgcccaggtcgaagacgaggatcttctcatccttgttggtcttgtcgaggccgtaggccagcgcggcggccgtgggctcgttgatgatgcggagcacttcgaggcccgcgatcttgccggcgtccttcgtggcctggcgctgcgcgtcgttgaagtacgcgggcaccgtgatgacggcctgcgtcaccggggagcccagctgcttctcggcgtcgttcttcagcttctgcagtaccatggcggagatttcctccggcgtgtagtccttgccgtcgatgtcgaccaccgcgcggccgtccttgcccttctgcagcttgtagctgacggtcttgcgctcttccggcgtctcgtcgtaggaacggccgatgaagcgcttcacggacgacacggtgttctcggggttcgtgacggcctggttcttcgcggccttgcccacgacgcgctcgccgtccttgcggaagccctcgaccgacggggtggtgcggtcgccctcggcgttcacgaggatttcgggctcggagccctccatgacggccatggcggagttcgtcgtgcccaagtcgataccaagaatcttgctcattatcctgcttcctctctgttggagttgttacctaagtaagtcgttagcagtcggtttctgtttatgcgccaaagcacgccctgagggcgcactcggtggacgaagggcggcggcttggagatgcgatccgcaagctcaacctcgcttcgacaaattggactatataatctaagtctcatgctgtcaagttagttaccaatttgtcatataagttttgttaacgtcccaaactatagctatcgaatgcctattgcgctcctctcgcgccgcaccgttacgccgcttccacgcacttgtttcccgaacgcaaagaacccccgcctcatgaaagagacaggggttctcgttgcgcttgtcgaaagcgaattgagcgggaggttagtcctcgatgacctcggggatcgcacccatggggcactcctcgacgcagtcgccgcacgcgatgcaggcgtcctcgttcacgacctcagcgacgccgccgaccacttcgagcacttcctgcgggcaggcatcgacgcagatgccgcaaccgatgcactcatcggcttcgataaccgggtgagacatagttaactccttctcgtctaaagcattccgacgggatgcgtcgggtcacttccccaaaaactttatgcccgcaagataccattgttgtccgcaaatgcaagaagaaatggcgaatttctcagggtgcggcggcaaattctctatcgaaagcgccgccgctttcatgccccgaaaggcgctatcgaaggcctttgcgcatgtcagcgctctcttccatacgcatgagggtgctgcatggagagcttctagcaaatgcgcggcaattgctcgcccaccagcatgtcgaggatgcgcgtaccgccgaacgccgtgcgcaggaacaccttggagccgcgctcgggacgggcggccgacacctcgccgatgatggccgcatcggcgccgtaccggttcgcgcgcatggccgcgagcgctgcgtcggcctcctcggccgccacaacgcacaccatcttgccctcgttcgccacctgcagcacgtcgtagcccagcatctcgcacgcgccctgcacggccggcttcacggggatggcgtcttcctccaccgtgatgtccgtgttcgactgggcagccagctcgttcagcgtggaggccaggccgccgcgcgtcgggtcgcggaagcagcgcgtgttcggcgccgccgccaacacctcggcgatgaggtggttgagcggggccgcgtcgctttccagatcggccgagaagctcaagctctcgcggcagctcatgatggtgatgccgtgatcacccagcgtgccggtgaccagcactttgtcgcccggcttgcactgcgcgccacccaggttcacgccttcgggaatggtgcccacgccgctcgtgttgatgtacacgccgtcgccgtggccgcggttcaccactttcgtgtcgccggtgaccagatgcacgccggcctcctgcgcgcattccgccatggaggcgcagatgcgcttgagatcctcaatggggaagccctcctccagcacgaagccgcagctgaggtagcgcggcacggcgccgctcgtggccacgtcgttcaccgtgccgcacacggcgaggcgtccgatgtcgccgcccgggaagaaatgcggcgtcaccacgaagctgtcggtggagaacgccagccgctcgcccggagcgggcgcgggcagcaccgccgcgtcgtcgccgcgcagcagctcgtcgccggcgtacgcggcgaagaacacatcgtcgatgatgcgcttcatcatcgtcccgccgctgccgtgccccagcatgaccgtggtatccataaagctccttgcccttctcgtgagtcgatgcgaacgaatgtttcacgtgaaacaccgcccgtcctgcaaagccgacgagggtttccgcggcgcccgagatcgctccgcttcgcggccgcgcgtgcttcgcgcgcaagggaaagcgagcaaatggcgagatcgggtgccacgggaagccgcagcgtcgacccgttccgatagccggtaggccgccggaaccgtatacctatatatgctgccccgtcgtggtgaccacgagacgaccgttcttcacgcccttcgtgcccaggatgaggttcgcgatgtcctgcacgagacccgtttcgccgcgcagcacgatgacctcaaggcaatggtgcgcgtcgagatgcacgtgcatggacgagatgatggattcgaagtaatcgtgctggatagcgtgcagcttctcctgcaagtcgctggcgtgatggtcgaagacgatggtcaacgtgcccaccacctccatgcccggcgtggagcactcgtcctccaccaacgcgtcgcgcacgaggtcgcgcaccacttcgctgcggtttttcgccagcccgcggcgcgcgaccagctggtcgaagcgaacgagcagctcctcgggcatggccaccgagaagcgcatgagatcgttgctcatacgtgcggcgcctacacgaggttgacggtgacgttcgccgaagcttcggcatcgtcctcgagggcatccttggcctcgtcgagcagcgcgcgcacgtcgtccagcatggcctgggcggcatgcatcttctcggaaacggtggcgaagccggcatctcccgccatatgccccaggttgtgcgcccagcgacgctccaacttgatatggtcgtcgatctgctcgatcatctgctcgaattgccctgtgttgattccgttcgtgcacatacgcgctctcctatcgtgatgccgccgcagcgcccatgccgcggcgggcgtttcttgctatcattacggttatacggcgaacctatctcgaccgcaagggatcgtgtgaaaaaatctgcgaatggtaacatgtacgaagtggctctcgacgaagcgtgggagctgttcgacgagcaccttgatggggcgcgcttggcgctcgtgtgcgtagcgagcggaagcgccctgagcgagcgcagccgagcagcgctgaacagcgcgatggcttcgttgggatacggaagcggcgcgtgcacgttcgccgccgtggaagggctggacgaccaggcgctgttcctgctggtggaggggctcgacccgctctgtctgatcgcgaccgattcgacagcggccgccgcgctgggacgcgcgtaccgctgcgaggttcccttgggaaagcccggccgcgcgttcgggcgcagcgtggtggcattccgcgacttcgacgcgatgctcgacgacgggcaagacaagcagatcgcctgggcgctgctcaagaagctgccccgcttcggagaataggaaacgccccgaaagctcgatgcctccgaggcgttctacgtacaaatgtttcacgtgaaacattcgcttcgctcttcgtttaggacacgaccacgctttcggcggccttcaggaggtcgtggacctcgtccaccgtctcggcttcagcgtagatgcgcacgagcggctcggtgccggaggggcgcatcatcacccacgcgtcgccttccaggtagaacttcacgccgtcgcgacgatccacgtccaccacctgcttgccgcagatctcggcaggcgcgtagttcggcacgatctcggcgcggaagttcgccatctgctcgtcagtgatcttcaggccttggcgctcgaactccagcttgcccaccttctggaacatatcgtccaccaactgacccaggctcatgccgcgctgcgccatcgtctcgcacaggagcagcgccatcagcaagccgtcgcgctccatgacgtggctggggatgccgatgccgccggactcctcgccgcccagcatgacgtcgcccttctccatctcggcgtagatccacttgaagcccaccggcgtgctggtcagctccaggcccaagcgcttgcactggcgagccagcatggccgacgcggtgatggtggacacgacgcgaccggtgaggcccttgtcctcggcgaggtgcgaggtaagcagcgtgatgatgcgatgcgggttcacgaagttgccgcgctcgtcaaccgcgccgatgcggtcagcgtcgccgtcgttgatgaagccggcgtcgtaacccagctcgggaaccttcgcgatgcagcggtcgacccagggcggaataggctcggggtgcagtccgtcgaacgtcggatcctcggcgttgttgatctcgcacacttccacgcccagatcgcgcagcagctgcgccagatagatgcggcctgcgccgtacagcggatccaccaccacgcgcaggttggcgttgcggatggcctcgacgtccacgcgctccttcaaggtggcgaggtacggggtcatgaggtcgaccgtttcgaacgcaccgcgcgcgtcggcgggtgcgtcggcgaacgcagcctccacgcggtcggtgaactccttgcccgccgcgccgccgtcgttcatgcgcagcttcacgcccaggtattcggccgggttgtggctgctggtcagcatgatgccgcccaccgcgtcggcgtcctgcgccaccgaccagcacagcgtaggcgtggggcagtagtcctgcgtgagcagcacgcggaagctctgcgccgccgcgacctcggccgccagctgcgcgtaagcgtgcgcatcctgtcggcaatcgtgaccgacgatgagggtgccgggcgcgtcggccggacggccggctgcaaccgcgtcctccttgaacacgcgcgcagccgcgtcgatgacgcgcacgaggttgtcgttggtgaagtcctcgccgatgatggctcgccatccatcggttccgaaatgaatttctgccacggagcttcctttctcaaagcctgttgctcaccagtatagtcaatcggccgagcaaggcgcggtttcgtcgcaaaatagacaggggaacggatgtttcacgtgaaacactcgctcgaacacgaaatgcatgtaaagcctccccgaacaaaacccgtgccgtcctgatacgacgacgagcacatacagcacggacgacctgcacagcaacggacgacccatccgcctctattttccttcgccaaatgcgatgccggtcatccgacgaggcctccgatggcaaaaaggcatcgaattcggaagcccggagtcgtgccttacacgcgccgacgtcacgccgaaaacgctcgccgcacagagcactaggttacaggcgagcccgctttcaccttcacgcgaaaagtttgcccgaaagacgggatgatttccgaattcggttgttttttgccatttcgagcgagcaggctgaccaaggctgccgcaaaggaaggcaatcccgagcatgatgcgccaagcaaggaaccgaaactgttgtttcgcatgcagaaaccgaggaaggcatgctccgagggcgaggggcggaccgagaggcgaaggagaaggcgcacaggcgcaacgggcgcacgtcgcgcaaaatgactccgaaagcagcacaggccgcggggggaagcggcctgtgcttggacgagtgaaacgaggagaaccgttggagtcggtgtttccacgagtcatactttacgacgtttattatcctgtgtcaagaataatattcctgccttttccgaatgtttcacgtgaaacattcgtgcggcttcccgcggcgccgcacggggtcccgcgcgagcccgtgcggccttgccgccgaacggaacgacctccatgtgccttttgacgaatttgcgcgtgatccgttccacctgctactatggcaacagtcagtaccgagaggagcttcaatggcgaacaagagcttggccaaggatcatgccgatatctgcgtgctcgtaacgggcggagccgggttcatcggaagtcacacctgcgtcgaattgctggagcagggctaccgcgtggtcgtcgtggacgacctgagcaactcgagcgagctcgcgcttgaccgggtgcgacagatcaccggcctggcggcaaacgacgaccgcctgaaattctacgaggcgaacatcctcgatcgcgcggcgctcgaccgcgtcttctccgagaacgacgtggacgccatcatccacttcgccggcttcaaggccgtgggcgaaagcgtgcagaagccgctggaatactactggaacaatttcgcgggcacgctggccctgtgcgacgtggcccgcgcgcacggcgtgaagaacctcgtgttctcgtcgagcgccacggtgtacggcgagccggagttcatccccattaccgaggattgcccgaagcacgacgccacgaacccctacggctggacgaagtccatgctggagcaggtgctgaccgacctgtacgtgggcgacgacgaatggaacgttgtgctgctgcgctatttcaaccccatcggcgcgcacgagagcggcctgatcggcgaggatcccaagggcatccccaacaacctgctgccctacgttgcgcaggtagccgtaggcaagctggaaagcgtcggcgtgttcggcgacgactatcccacgcacgacggcaccggcgtgcgcgactacatccacgtggtggatcttgcgcgcggccacgtggcggcgctcgactggatgggcggcaaagtgggcaccggcgaagcgaaaacggccggcaccatggcgggcgaaccggccgccgacggcacgcgtcgcggcgtgggcattttcaatctgggaaccggcacgggctccagcgtgctggacgtggtgcattccttcgagcgcgcctgcggacgcgagctgccctaccagatcaagccgcgtcgcgcgggcgacgtggccgtgaactacgcggcctgcgacaaagcgcgcgacgagctgggctgggtcgcgcagtacgacctcgaccgcatgtgcgccgacggatggcgctggcagtcgcagaacccggacggctacgcgaccgctcgggcctagaccgaatcctcgacgcggccctcgttcttctcgtcgtacatcgcccgatcggccgcgtcgaacagctcctgataggtagcgccatcctgaggatagcgcgccaccccgacgctcaaagcgatgggaacccccaacgagcgcgaggcttctgcgatcgacgagctcagagcctcgcgcttcgcctcgataaccgcatcgtcgtttgcgcccacgaggaacgccacgaactcgtcgccgccgacgcgccccaccggatcgcgatgacggaacacgtcgagcaacgaacgcgccacctcttccagaacccggtcgcccatgctgtggccgtattcgtcgttgacctgcttgaagcgatccatgtcgatcacgaacagcaagcccctgctcgtctcgggcagcaatgccgccatcttctcctggaacgccatcttgttgaacgtcttcgtcagcccgtccatttgcgacttgcgcgtgagcagctcctcggtttcgcgctgtttcgtgatgtcgacgatctttcccacggccatgtacggttgggaaccttcgtacagataccggcacgtgaacgagaaccaacgatattcgcccgacaacacgcgtgcgcgacaggtgatggtgcgcagctcgttcggcggcgcagggttttcgaacgccatccggacacgcttgtaatcatcttccaggaaatcgatgaaagggacgcctttggccaggtagccttcggcggaaagggagctgagggagaacatcccgcgcgcattcggtgtcagctcaagcgtgtcgcgcggataagaatactcgaacagcaccgtgtcggaaaattcagcgagaacctcgtagcgctccgcgctgcgacgcgcccttttgcggatgcggccaaccaccagcgccacggcaaggcatgccgccgcgctgatgacgataagcagcgcagccgtgtacaccgtcaaacgcagaatgctctccgaatgctcgaccagcgaactttcctgcgtgaagttcacgatagtccaatcgttcacatcgaggcgaatagacgtgagaaaggtcatgtagccgttctgcttgcccaacatgaccgttgccacatctcgctcgttctcgatgctggcgcgtacatcggcgatctgatcggaagacacgccccttccctcaagcacctggtacagggtggatcccccataaccttcgaattccttcgacacgggaacgacggttccgtcctctttgatcagcagcgtgccaagcagcgtaacctgcgagctcgcctggctcgtatccagaagcttctccgcttttacgatgctgcgcagcacaccgaccacgcgcccgtcgcgagtgacgggcttggcgatgctgaagtagtagccgttcaggcggttcgacttgcgcacgtcggacaccaccgtctcgcctgcgtacagatgccgaagcgtttcctcgtcccgctcgttgcgattgctcgcaacgccctgctccagcgtctcgattggagcataggtaacctggaacgacccctgttggttccattcctctagatacgcagcgaacgtcgagccggaaggatcgatgtccggggactcggccaacacgcacatggtggagatgacggagctcacctcgctgatgaacgactcgacttccactttttgcgcagccgtataatcgtccatgctgacgctggctaaatcgtagaattcgtcgctgagctcgttggagtagacgcggaagatcgcgaacatcacgaggcaaaccgcgatgatggagacgatcacccctatcacggtgcgcaaagagctggcagggccgacgcccttgttttctttcgcatgttcgtgattgtgtacgtcgctcatgtctttgcgagccccatccgtctttgcaaccggtgatcaccagtatcccgcagagggtacgaaaactcaacaggagagccgaagctcaacctaccggttgaggagccgattaaaaagcggcatcgatcgaagccgatgccgcttgcgcagttcgaggatcccaacgagacgccggctaagcagcggatgccgtcccgtcgtaggcgcccggatcggtatagccggggtcgtatccgcctgcaccgtcggtaccgcccgcgccgccagcaatagttccgttgtcgtacccgccggttccacccgctccgccggtgttgtcaacgtaaccgttgtcaacatagccgccgttgttggcccctccggttcccgatgcatcggtgtagcccggatcgtaataattggtgtttcctgcgccgttgccggcggccgaaccagtgctgccgtaaccgttgccgtacgtgctggcaccgcctgtggtgtcgcccggatcaacgtatcctgacgagacaaccgagctcggatcctctccagcctcaaccagcttcatcatctccttcgtcgccacgggatcgttgatgacgtacgatacgtcgccgatcatcgccgtggtagaaggaaccatcgcagagtagatggtaagctcttcgtcgccttggaactgttgcgccagcgcagcaatatcgcctaccgcaaggtcggtggtcacgcagttcgacgcagcttgaacaacacccagcaactcggttgtgttcatcgccagcaccttgttgacgatagccatgatcagcttgcgctggttcgccgtgcgcgtgaagtcgccgtcagcgtaagcgcggctgcgcgcgaacaccagcgcttggttgccgtcgaggtgctgctcgccttcctcgatgatgacgcgcggccactcgggatgagccgtggtaccgtctgcgtcgggatcatcgacgcgctcggtcacttcgacgtccacgccgccgactgcgtcgaccaattccttcaacttgccgaagttcacttccgcgtagtgcgatatctcgatgcccagcagctgattcgcttcgcggatggttccggcagcgccgccgtaagcgtaagcggcgttgaacttgttcgtcccgtagccgtcgatgtcgatcttcgtatcgcgggggatggataccatcgtggcctggttctttgcaggatcgatgcgcaccacgatgttcgtgtcggaacgatgcatgtcctcggtgctgtcctcggcctcgtcggtgccgatgaggatcatgtagaagggctcggtgaaggtcatgtccttttcaggcttgagcgcatcgttgatggccatgatctcttcgtcagacttgtttcccttgatcagcttctcgttgacggagttcttccacaaggcgaacgccgaaccgccccccacggccaccacgagaatcgcgatgatcacgccgagggctatcttcttgccgcgcccggctttcttgcgggctgccgagtagcttggattgttgcgcgaatattgacttgccgcagtctgccgggcgtacgcgccgttcgcgccggaaccttggctgccgggcgtgtaggccgcacggtacgaagagccatcgccatacgcatcgcgggagaaagcgcttgcctggctgtacggggcgatgcgacccgactgcgcggccttggcagaccgcacggcgcgagcagactgaggagcccgcgatgagcgcgcttctttacggttcgttcgagagtttcttgacgccatatggtctcctcatcgactccgaacacgtctgccaaagcaggcaccgtacgtcgcgtacccctcgcgacacagcgcttcgattgtcgaagccttcattttctcatacctacgagaacccgctttcgccggcgattacaccatttccgcaacataacccgaggtcgacgcgcatagattctcacgtatggcagatattgtagcatcgttgacctaccatcataaaataggcatgggctgggtacaaaccgcacattttctaaaaatgaaccgaaacgtattcatgcggttacagccttctgctcgcacgccggtactctagtggacatgcaagccgagcacgaacatagtccgctgaatgatgacgagcctgatcagagcaggttctctcccgtgcttggcgagaacgtcagacgcatgcgctcgtacagcaacatcacgaaaacgcgcctcgcgctcatggtgagcataggtcgcccgctgctcaataggatagaggacggcacggcggacgtacggctatccgtcgtcacgaaactggcggattcccttgccacgacaccgagcttcctgctggcgaagcacagcgatgaggacatccgccacgaaatcgcccatcggaaagcaagctcccccgtcgctgcggtgcgacacgcgcgcttttactaagagcgggcatctctttttcgcagcaccgcgtacgcgatcccggaacccagcgcgctgcccgcagtatccaccatccaatccaccgggtcgcacatgcgctcgggcacgaacagttgatgaacctcgtcgctcaccccgtacaagctggcacaggcgatggcgatgaggcacgcacgacgcagcggcatgtggcagcgcagcgcgttggccagaagcgcgccgaacatcgtgtactcgcagaagtgcgcgatggacgacagcgcgtccaccccaggccccagcagctgctcctgcacggcctgcattgcccggtagatgctggagaagatgccgagccccgtgttgagacccgtgccggtgttcgaagacatgaagaagatgaggaacgcccacgccgccacgagagcccagctgacgatgacgaaccgtttcgacgggcggggctgattggagagggtcgacggctgatgctccataatgcccgccgcctagcgctcgaccgcgaactgcagcagttcgcgcgcgtcttcgataacgacgtccgcgcccgccttacgcaaggcgtcggcgtggtgatagccccacgacacgccgatggcgaacgcgccggcgttgcgcgacaccaggacgtcccccggcgaatcgcccacgtacgccgtgcgggctggtgcggaccccagctcgtcgatgcagcgcagcagccccgtggggtcgggcttgcgcggaatctcgtcgcattcgccatactgcaccgggaacaagccgggaagataggcgtcgatcacgtcatgcacgccctggtcgaacttgttggacagaacgcccaggccgatgccgcgctgggcgagggcagccagcgtctcttccatatgcgggtagggcttcgtcagcttgttcccgatgacgggatagagctccatccagcggcgcatggcggcctcggcctgctcgggcgaagcatcggcgggcacggcctggtacatgagcgcgcgggctccgttgcccacgaagctgtggatctcgtcggccgtgcggctggggaagccctgctcgttcaaggcggcgttcgtcagaaccaccaggtcgggcagcgtatcgagaagcgtgccgtcaaggtcgaacacaaaggtatcgaaacgagccatgtcaatctcctcgctaaatgaaaaatccaagccgaagcttggatcgtaggttcatggagcgggtgacgggactcgaacccgcgaatacaagcttgggaagcttgggccttaccacttggcgacacccgcatgattgaggattatagcgcaagatgcgcgaagtgagaaacagtaacgaaaattcgcgcactgaccacgaataccgatgacgcggcgaacagagcgagcacgacgcgctgttgccgcctccacgcatcctgccagcccgtcgcagcgatgccagctgttttccgaaaacctataagaagacacgggcttcgtgtttctagccgaagcaactttcaccgctctcgccttgtccagcgagccgccccaatccctctccgaccgcttacgagcatcatcgctggagacgaacctgtcgaacgcaaagacgcctgagcaacaccaagctacgttaagagatgttgcaaaagtatcgtatttcgatacaattgaaacatgaacaagaaccgccacacctctgcgatagaagagctctcggcttcggaaggcgttttcaccacagcgcaggccgagcgtctcggcatcccccgcaatgcgatcgccaaagcatgcgaggcggggaggctcgtgcgcgtcgcccatggggcgtatcggatggccggggtgccggcatcgcagctcgacgacctggcggccctctggaagctcaccgatcccgcgaagatgacgcacgagcggatgcaggctggcgaatgggacggcgtcaccgttgcgggaagcacggccgcatcgattctcggcatcggggacttctacctctccccctaccgtatcctcgccccgaggcgcatcaactcccgcaacgccgaggcaaggttcggcatacgcggcgtaccccgtgacgacgtgtccttcatcgaaggcatacccgtgacgggagccgagcgaaccctcgtagaccttgtcctggacggcgaggagccgtcgcttgtgcaagacgcgtttgccgacgctcgggcgaaggggctcgatacggaaaagctcgagcgtcttgcggcggaagcgaaggcctccgccagggagagaaagacgatggagcggctcttcggaggggaggcatgatggtgtgcaagaccccggcagctctggaaatggctataaaggccgcggccaaggcttctcccctcgaaaccggcagagccgtttccggcttctacttccacaggctcttatgtcgcgtgttcagcaagcctgactcccctttcatgctcaaaggcggccagagcatgctggcgcgcaccatggacgcgcgcgccacccgggatatcgacctgctttcggaggaggcagacctcgacgccgcgctcgccgagctcagagccctcgcagaagccgatctcggcgatttcgtggtcttcgagttcgtaggagccgtgccgatcaaggtcgaggacgagtaccgatcggggctcaaggtcgccttcgtgcccttgcttggaggaaagcggctgcaggaggtctcgatagatttggtggccgaccgcgttgcctgcggagagcctgagatagtgacgccggccgacaggatcgacgttgcaggcgttccgatgttcgactaccgcgtgtatccccttgcgaactccctcgccgacaagctctgcgccatggtcgagacgcacgacggcaaaccttcgtctcgcataaaggatctcgtcgacgttgcgatctacgcaactaccgtcgatatcgatggcggcgaactctgcaggcgggtgcgcagcgaggcgggcgcacgcggaatagtgctccctgacaggttctcggtgccggatgaatggaagcagctgtacgagggcgctttcaagaagctggttagccgtaccggtctttcttccgagctctccgacatcgcggcggccgaagcacttgccgcaagtttgttcgatcctgttttggctcgaaaggctggcgatctgcattgggatcacgagagtctgagttgggaaggccttgtcctcgagcatggcgaggatggacgccgcacctccgagcttctccgactattgcacgattgctgacacgatctcttcgggtagagtggtatgcggaccgctacgatgccgacgcggcggcagaagagggctctccccatggcaagaaaccatcgaattcggaagttttgcgccgggctctggatgcaccggaaacccttcttccgcatagcgcctggtcgaaaggaggcgagcttccgcgaccgcgcgtctcggacggcgaaggcgcgcggcctcttccgaattcgatgccttttcgccattacgggcggctcgccttgctcgcacgcggcccggacaagcggccctgaagcgcgagggatgtttcacgtgaaacatccttacgagaaaacggaacgtccggacgggcggcacccgggcgcccggatgtttcacgtgaaacactcccagctccccgccccttctgccgtcaacgcgcgcggcgctcgtcctcgtccgcacctgcgccttcgagcgcgaagacgtgggtgcagcactcgcgcatgaactcgttgtcgtgcgtgatgaccaccacggccgccccctcctcggctgcgcaacgcagcgcgtcggccaaccggcgcatgctgagggcgtcaagcccgctggtgggctcgtccaggatgagcaccgaccgcctcgacgccagcccgcaggcaatggacagccgctgcttctggccgcctgacagcgaggacggatgcctatcccccagctcggccaggcccaaccggcccagcacatgatcggcgtagcggcgcgccgcgtcgtcctgatccgagaacaagagcacttcttcgtcaacccgggaagagaagaactccatgctcacgtcgttggggctgtaccacacgcggcgacgcagctcccgccgggacagcttccgccctcccacgcgcacgcagccctcgtcgggtcggcccaagccaaccgcgacctgcgccaggctcgtcttgcccacgccgttttttcccgtcagcgccatgatctgccccggttccacggcgaagcagacacaggagaacagcagatttccaccgcgagaaacggccaggccgtccacctccagggacgcggcttccagacgcgcgccgaaagcttcgccggacgcggcccgctcgccttcccgcgcgagccccgcggcaagaggcgcaggcttcaaggaaggccgggggacgaaagcagggctgcgaacgcccatggcaacgcgctcggagccgtccatggcgaacacatcgtcgcgagagagaaccgcccgcatccgcccggcctccatatagcagaaccggtcggcgcactccatcaggtacgagatgcgatgctcggccaccaccagcgcgtagccctgccgcttcagctccatcagcaccgcgcccaactcttgagccgcatcttcgtcgaggttcgaagagggctcgtccatcaccacgagcctcggcgcaggagcaagcgacgaggcgatagccacgcgctgcttctgcccgctggaaagctcgtccaccgctatcgtgcgcaaacggtccagacccaaacggccgatcgccgcatcggtgcgcctcaccacctcctcggcgggatagccgatgttctcgcacccgaacgccacctcgcccgccagctgactggagaagaactgggcggtcgggtcttgaaacacgcttcccaccagctcggctcttcgccacgcctccatatcgcgcgcagaaagcccgcccaagaacacgtcgccggaaacgctgccgcgatagtagcccccggccaggccgttcaagacgcgcacgatcgtggttttaccgctgcccgacgcgcccataagcacgacgcattcgccggcatgcacgtccaaatccacggcatgcagcgtttccggagcgccgtagtacgagaagctcgcgcctttcagctgcgcgacaagatcgccggtcatccgaaccaccctccccgcacaacccagacgcacgcagccagcgccgtcgcgacggccgccaggcaaaccgcgtccgccactccgaaaggactgcgatagtagctcgtccgcctggtcggcgcttcggcggcgcgggcgatggcggatgaggaaaggcggtcggagctgtccaccaacgagaacatcaagggaaccagcgcatgctcgagcgcctgaacggggctgcgcgcgacgtttcccgccgaaagcaccccgcgccttttgcacgactcggacaaacgccggaagctcgagcgaacggtggggaagaacctcagcagtacgagcacgcccacgatcaggcgcttcggaatgcgagccttcgccaacgcggcgctgataagccccggaggggaaagcgccaccgcgaagaacgcaaccatgatgggataggttttgatcgcggcgtaaaaatgaaccggcgagaaaacgatcacagtcatcttcccgtatgcaagcgccaggcacgcgccccacagcgccgcgtagaaaaccagcatcttgaaagccatggaacgctgtccgcacgcagcaaggtagagcagtaaaaagcaggtcagcgcaggcgacaaccgcacgctgtccaccagggaaaccgtcgcgatcgtcgcagccagcacgatggacttcgtcgccatggagaaccgttccccgtcgggcgacgccgacgaacgcccgacggcgcgagcgcccgatgagaaccgctcgtttcggatgccctcctccacgtcagatcacccctgccttcaggaagtgcttcctcatcagacgcttgcccacgagggctcccaggaatccggcgaacgccgtgagagcgactatgaacacgatccattctgcattcccgtagtacttgaggtacgcgttcacgtactcctcgcccatcatcctcacttcggcaagctcttgcaggtacccctgaaggttgaccagtatggggatgatcgacgacagcgagtacagcgcgctgaacgtcgcccacgccgctacgatgcggttcggcttagcccgctgcgcggccgtgcgcaggaacagcgcatcgatagccaaacctcccaccaggtagaacggcagcatgtaccacaggtttccgaacatgaggtacaccagcgccatcacgcacgcgtagaacgccgtgacgccgaagcggttcaccctcataaccatgagcatgtacaacggcgcaaccaccaaaacgtacgtcgccgccatgaacagcatggagaaatccacacccagcatggtaaccgaccccaccacgaacaagacgacgatcatcaaggcgctgaacagcaccgcggtgacgacctccttgacgccccacatctcgaacgcggcccctttgcgggacttcgacgtctcataaggcgaatgttccatatcgacctctctttcccatgcgttttgcatgtcttggttcatctgatgttccggcaccgaacgcgccggatcgaatccgaagcgctactgctcgctggccagccgccaaccggccgcctgctggcgctcgcgccaaaacgaccgataccggccgggcaccttcaccagatcgccgtgggttccctgctgggtgatgcaccccttctctaggacggctatctgatctgcggcggcgatggtggacaagcgatgggctatggcgatgaccgtgcgatcgcgcgccaactcgtgcatagcctccacgatggccgcttcgttttccgcatcgagcgcggccgtggcctcgtcgaacagcacgatgggcgagtccttcagcaaagcgcgcgcgatagcgacgcgctggcgctctccgcccgaaaggcggcagcctccctcgcccacgggcgtgtcccatccctgctccagacgggcggccacctcgtcaaggcgcgcgacgtgcgcggcgcggcgcacctcctcgggcgttgcgtcggggcgccccgccagcacgttctcctcgatggttccgtcgaacaggtacacgtcctggaacacgagggatatctgctgcatgagctcgtcgggacgcatgtcgcgcacgtccaccccgccgatcgaaacgctgccctcggaaacgtcccagaaacgcgcgaccaaccgcgtcagcgtcgtctttcccgagccggaagggcccactaaagcggtcaggctgcgctcggggcacgtcaagctcacgccttgcagcaccggacgggattcctcgtaggcaaagcccacgcgatcgaacaccacgctggatccgcaaggaacgcgggggttgcgggtttcgggcagagggggcgtcttcaatatcccctcggacgcgtccagcgcgttcttcgccacgcgcagcgccatcccctgcgacccgatgagcgtcaaaggatcgaccagcctcaaggagagcaccgctacgaacacgtacgatgccacgtcgatctggccccaggccaaaagagccgtggccgttgcgaacacgacggcgaacacgacctggatcagcatcgtgtagcgcgccacgggtgccgatgccatgcgcaaggtggcaaccgtcgccgcacggtcccgctcgatggcctgctgcaaagcgtcccagccctccaccgaacgcttcgtcgcgcgcaaaacgggctgagcgtgcgcgaactccaacacccgggccgccacttcagcgttcgagagctcctcctgcctatggccttcgcctgcggccttcgccatggcgcgcgaagcccacagcagcagcggagccgcaatcacgaacaccaggccgatgcgccaatccacgaacaggaacaacaccaccaccgcagccggcgtggtgacggcgatcaccatctggcgcaaaaacgtgctaggcacgtccatggccatctgcagctccttggtgagcagagccgcaacctgccccgagcgctctttcgtgaaccaccccagcggcaggcgcacgatatggtcgcccaaggcgtcctgcagcgcatggcagatctgctcgatgccgatatagtagccgcgattgtccgcgaaaaagccgatcacggaatgcaacagcgccagcgccgcagccagcgccaccagataccccgccgcaacgtagtcgcccgctatcagcgagcgcagcagcggaagcagcgccacgtacacggccgcctccgccaggccgcacagcacgtacaggaaagcctgcgtcttcacgccggtcggccgccctaccagatcgtcgatttgggtcgttatcatcgttcctcgctttcgcgcgaatcggcaccgttcggctccgcttcgccatccgcttcttgcggccccgcggccgcgccgcgcatcgcggctccttccacaagtagcgccttttccagcgcatccacctgctgagatcgccacagtgccgcataatggccgtcggccgccagcagttcctcatggacgccgcgctccaccaccttgcccccgaccagcactaatatctggtccgcatgcacgatggtgtccagccgatgcgcgatcacgacggtcgtcctgcctttcgccaacgcgttcagcgctttttggatggccgtctcgttctcaggatccgcatgggcggtcgcctcgtcgagcacgagaataggcgcatcttggacgatggcgcgcgcgatggccacgcgttgcgcctcgccgcccgacagatccgagccttcgcttcccagcaccgtgtcgtagccttgcggcaactccattacgcgatcgtgaatctgggcctggcgcgcggcggcctgcacctgctcgtcggtggcaccgggacggcccaaacggatgttgtccgcgatgctcgctcgcaaaagcatgctgtcctggaacaccacggcaacacgcgaaagcacctcgccggaggccatctggggaagctccgttccgttcatgcgcaccgaccctgaaacgggatcccagaagcgagggatcaagcgggcgagcgtcgtcttgccgctgcccgaatctcccacgagggccgtcaccgttcccggctccaacgcgacgtcgacgtcttgcagcacgaaaggcaggttctcgccgtacgcgaacgccacgccctcgaactccatgcacacgggtccttcggccgccgggcgaggccgctcgggttcggccaacggagccacgttgagaacggaggccagatggtcggcggcctgcagcgacatctgcagcattcgaatgcttcgaaacaggttgaccagccccgcgggaattcccacgcccaacaccagaaaagggacgcaccgctccaaaggcaaaacgccgttcgcgacgaaggccagcgttgcagccagcagaaccaccagcattgctcccggcgagaacaaggccgacacccagctgaacgcgttgccattgcgcttcgtccacacatagcacgctttcgccagctcctcggtagccgcccggtaccgtgcgcccgcacggcttcgggaaccgaaggtcttgatgacggcgatgccctccaccatctccaccgcagcggaggaaacctccaccatcgcttcgttgaacctcttgttgagaggaccgaaatccctcatcatgaacggccacgcaacgcctatcaccacgacgaagtacgccaccagaagaagggcgaagcgaacgtccaccgtgaacaggtacaccaaggggatcaagggcgagagcagcgcggcggtcacgtcgaccggcgcatgcccgaccgattgatgcaggttgagaacgtcatcggtggcagcttgcttcacctgcgccgagctgttgtcgttgaaccatcccagcggaatcttccccaagtgctctatcagcacggtgcgcacgtgaacgcgaaaatcggcgtcggcgtaatgacagcggccggtggccatgctgaacagcatccttcccgccgccgcgcccgcgacggcgaccagaacccacatcgccagcacgtcggacgggggaacgccttccgtgatggacagctgggcaacgcgcgcgattgcgagataggggacgaactcgcacgccgacgacaaggccgcgatggcgacgttgcctatgatcctccctttcaccggctcgatcagacgcagatacgtgcgccgagcggcggcactgtcgacagattccataagcggcactcttttctctctcggaaacaggggcggcggcggggcaagccggccgatgtgcagatgttagccatagctaacttcaagaaatgattttggggatttcaccacataatctacatacattcttattccgcacttgcatgagtcggaaacaacaagtaagttagacatggttaacatatagcgagcagacccgctcccgacgttcgggcggcttatgcccgacaaggaaagcgaggaaactcatggctcgacaggttctacagcaagacaaacgcgcgctcatgctcacgcaaacgcccggcaagctcatgatgtcgctcagcctgcctgccatcgtcggcatggcggtcatcgggctgtacacgttcatggacgccgtgtacgcaggacagcttatcgggatggaggccatgggagccgtggccgtggcctacccgttcacgttcatcaattccggcggcgcttcgatgatcggcatggggtcggcctcggtgctgtcgcgcgccatcggcgcgaaagaccagcgcaccatcgaccaggtgatgggcaacctcgtggtcatgaacctggtgctgtcgctcaccgtcacgatcgtcggcacggtgttcgcgcgcccgctgctggccctcaccggcgcacaggggcaggtcctcgacctggccgaatcctacctgcgcatcatgctcgtcggcagcctgttcgtgaacttcgcgcaaagctcgaacatggtcatgcgcggcaaaggcgagctggcgcgggccatggccatcatgggaggaggcgccgtcctcaacatggtgctggcccctctgttcatcctggccctgcgcgaccaagggctcggcatccagggggcgggctgcgccacggtgatcacgcagatgatccaagcgggcgtcatgctgtggtggttcgtcaagcgcgagaagacggcgcgtatcgtccgcgtggccgtttcgcccgcgatactccccgaagtgctgaaggtgggcgcgtccgccatgctcatgcaggtgctcgtgctggtacagcaagccatcgcctaccgcgcggccgccgcatggggcggcgcggaatggcaggtgctgctgggagctgcgctgcgcatccaggcgttcgccttcatccctttgtggggcatgagcaacggcctgcagcccgcggccggaacgaactacggcgccggactctacggtcgcgtgcgcaagctgacgatcgtcttctgcctgggctcgatggcgctggcgctgctgttctgggtacccgcgatgctggcgccggaagccacgctgtcgctgctcgtctccgacccggccgtcgccgcgatgggcgccgacgatttcagggtgttcttctccacctacctggttgcaggccccatggtcatgggcatcacgctcttgcaagcgctcggacaaggcggcaaggcggcgatcctcacgttcgcgcgacccgtggccctgttcgtcccgctcgtgctgatcctgccgaacgtcgcagggctcggcatacacggcgtatgggccgcatcggccctgtccgacggcgtcatgatcgtggtggcggcgttcatggtggcaagcgtgatccgcaacctgggaaaggacgaaggctccgcagcagaccgcgtgaccatggaagaggaagccgcccgagcctagcggaccggcgcgccgccctcttgccgctgccgtcttgctcgtgcatcatgcaggcgttaccctcgaagagctggcagcgcaacggttccgcgcatacggcatcacgagcaaaccgcccgatgtttcacgtgaaacatcggggttcgcacgctgccccgtcgcgtcgttcagccgcaaacctttccgagcacgcatgcaagcccgtctatgtcgaccggtttcgccacatgggcatccatgcccgcatcgagcgcggacttcacatcttcggcaaatgcgttggccgtcagcgcaacgatcttcacttcttccgagcgggcactgctgcaagcgcgcagagcgcgcgctgcctcgtagccgttcatcaccggcatcatcacgtccatgaacaccgcatcgtaatatcctgccgggtgcttcgagaatgcatcgatcgccttttcgccgttctcggcccactccactttcgcgccgcggcagccgagaagctctatcagtatctcagcgttcagctcgttgtcctcggccaggagaaacctcttgccctcgaatcgataggaggtgctctccggcacgacttcaagcggcggacaagcatccgccgacgagacgacgcgaagttccaatgtcacgcgaaacgagctgcctcgtcctttttcgctgtcgacctcgacaatgccgcccatggcgtcgatcagcgccttcgttatggacatccccaacccggttccctgtatccgcgcgatagacacctcttcgctgcgctcgaacggatcgaaaatacgctcgacgaattccggcgacatgcccatgccgtcgtcggttatcgtgaaagcaacgctcgcatagctgggccgcgttttcgccagctcctgcacgacgagggctatggagccgccctcctgcgtgtacttcaccgcattggacgcaaggttcaaaaggatctggcttatgcgcagctcgtctcccgagaacgccttatgcttcatcttcgagcaatcgatgcgcagctcttgactcttcgcctgagcctgaggacggatgatggcctctaccccgcccacgacgtcatcgatgtcgaaccgacgctcctgaagctccatctgcccgctttcgatgcgcgacatgtccagaacgtcgtttataagctccagcaaatgacgagacgacgcggtgatggcatcgaggcaaccggctatcttctcgctggcctcgccgctttcccgtgcgatcttcgtcatgcccacgatggcgttgatgggcgtgcgtatgtcgtgcgacatgttcgcaaggaactggctcttcgcctcgttcgacgatcgtgcgatatcgagcgcctgctcgagcatcaaacttcctttttgctcgttcgtgcgatcggacagcaccagcacgtacttatccacccctttgatggattcccggtacaacgtttcctggtaccagcgacgctctcctgtgcgcgcttgaatgcgctcgcgaaacacttgaaggcactcgccctcttccaacgacgcaatgtcatcgattcgagggtcggacgatggatcggccgccgaatccgacagcgctcgtatgttgttcttcaccgcttcgaccgacacgcccaaaagcttctccacattgggactgacgtattcgacctcgtacgcatcgggagagaacataacgtagatatcgtcggcattgcgcaccagcatgctgaacagctgctcgcggctctcgatggccagctccttcgcatcagcccggcgccgcacgcggcgaagcagggtcagcaaacccgccaacccgaagatgcgcgtccagcgcgcattcggcgctcgcttcatgcgtcagccaatctctgagccatcgacatcccctcgatcaaaccgacctgcctgagtgcagaaattgttatacctgatcaaacatagccttattgcatgcggtgtcagagtatagcaccctattgggaaggaggtaaaccgtcggagcccgccgcggtcctagggcacgatcgtgcggtcgacgtcaatcatacccgccctctcgagaaacgcgagcacggactggagcataaggcggtaatacgcggtcatcgattgggagaacccctcgtcgtctgctctgcgcgcctgcccgagagcgatgctttcgagagacgagagagcggacgcgctttctcgcgaagccgcgaacagcgtaaggaaggctccccagcgcagcaaatcgttcagctcccgcagaatcgtctgcaatgcgcaaggctccgtgcattcgatcaaacccgtcatgagagccttcgacaccgcccaatccccctcctcgaccgcgagggcgcgttccgcagaagaggccacctcctccgcatgaccttgcacgcggctcaatgcagcaggcagcacggcgcacatcatctgcgccgcatggacgtacgtgcccacatctctcttgaacgagtgatcttccagccagcgctcgctgaacgtcgcattgcccaactgcacgcgcgtgcccaacccgttgacggtgcgcgcgacgcctatgacgttgagcgcgccgtacgctttctgcaccgtggaagcggagactccatactgcgccgacagctcggcgatggaaggaagcagctggccgtcgacgaattccccccgaacgatgcgttccacaagattgcgagctatttgtccgtgcacgaattccaacccggccttcgcattccacgcgtacccgaacgatccgatgtccacggcgggggcatatgcgttctcgagcgcgtcgaaatacgccccgacgcgctgcgcgacgccgcgatacatgcaaccgaaccgatactgcacctcatcagcatcgcgcaaaagcagagaggagaacatccacgtcatcaaacccccgtcgacgtcgaccgcacgcgaggcaaaagggctttcgaaacccggaaccaccggcaccagaccgatgcgctccaagcttgcgaagcacgacgtgaacaacgggttgcctgcctttgccaccaggccgtgcaaaacaatcgatgcgtgcgatatgcgccacccttccgatacgccagagcgatcaacgcgcttcgcatcctgagccaaagcgaaaagatcctcgtcagagcagcatcgagcggctaagtggaacaacgggggcatgaccagttcgagggttctgtagcaatcggcaaccacctcgcgacgcgccagcagcgcacggatgcgaccgtcatccgcgtcatcggccggacggtacgccacgacagcgcgctttcgctcctccacgacaatgtacccgtcggccttcaaagcacgctgcacgtcgcggatggttctgatgcccacccgaaatcgatcgcacaagtcatgcagcgacggcaacgcatcgccatagcgcagcgcaccctgctcgatgtcgctgacaagctgacgatacacgtactcgaataaggtggctttcttttccaaacctctccttcgccgcttccatgatgcgatattgtaccgcggcggctaccaatcaagcagattgcctatcgaatgaagcagataatattttatcggatatctaatgaaatccccggtcaaacagctgctacgacaacgagaggaagcaaacgagcaccgatgtcgattcaccatgctaaacgtggttgacattaaatgttttaccgtctaaactactggaagtcgtcataatttgacgaattcacggggaatgttaggacatggtgttgatgtttgagctgaacgtcaaatcctacatcaagcggaacccacgcttacgccaagcgaagatgggtatgctcatgagcaaatgggcttggaaccgcaaagtctgcccccgccagttcaagcgcttcttctccagcttcacgttgccgaagacttccgcgctgttcgcctcgttcttgaatactcgccgcgttgcgtattcctccgcaaactacggagacgcctcggcaaccaagctcttcatcttcctttcctaagttggtgcccctcgggggaagtgcgcccttcgtcgggcggcgcttgccttgtatcgttgtgcccgcagtaaggagagaaagggggtgaaggcaggacggcgacgtcctaccttcccggaggatctccggatgcccctaacaaccgatccttctcaccagatcgttgccaaaagtatacgaacaccagccgatctcagcaagagttcggcaagcggtcgcatattttcctccgatcacctatcggtagttaggttccgcatcccgcctcctggaaggcgacgcgaaagccgagggcacggctcagcgtcactcagctgtacatcgattttcaccaagaccgccgtagggcggcctgggcgaagcatggtctgcagcagacatcgatccgaaagaatcgtaacagatcgcggacggtccctgcgaccgaacgcacacaggaggtaaacatggctaccactacagccaaaaagaaggggatccacttcgcatggttcgtcctcatcggcgttctgctgatgatgggtctgtgccgcggcggcatcaacagcggcatgggcttgttcttccagcccatcagcgccgacatgcacattggcgtgggcgaagtggcaatgatgtcgtccatctcggcattgatcactatgttctggagcccgttcgcgggtcgtctgctcgacaagttcgacatccgcatcatcaccgtggtcgccgtcgccatccaggcgggctgcttcgccgcgctgtcgctggtcgacgcggtgtggggcttctacgcgctggccggcatcatggcgttcggctcggtgttcgccacgcagctggtcggccccatgatgatcaaccgctggttcaaagataagaacggcctggccatgggcattatgatgagcttcgtggccatctgctccgcagtcctctcgccggtcgtcgcctccatcatcgcatcgaacggctggcgcatgggctatatcgtgctgggcgtgctcgcgctggttatcgtgatcccggccgtgctcatctggttccgcacgcccgagcagaaggggcagctgcccctcggcgccaccgaggccgacatcgaagccgccaagaacgccgatccgaaagccgccgccgaggccgcgaagaacctgccgggcctcacgtccaagcaagcgctgaagacccccacgttctggttcttcttcatcttcatggtgctgctcaccggaacgctggcgttcgcctccatcgttcccaccctggctatcgaagctggtttcgataccgtgaccagcggattcgctatgacggcgtacatgatcggcacggctatcgccgccgtcgtgttcggcacgatctccgacaagctgggccccctcaaggccacgatggtggcgtgcgcgtgcggtttcatcgccctcttgggcctcatcttcttccgcacgaacctgtacatgttcttcggctcgctgttcttctacggctgcctgtccgccacgctgggcgtcatcggcccgctggtgctaggcacgctgttcggccagaaggaattcggctccatctacggcatcgtcatgatggccaccggcatcggctccatgatcctcatcccggcgtacggcttcatctacgatgcgacgggcagcttcacgcccgccctcatcatgatcttctgcttcatcgtcgtctgcctgatctccatgatcatggccttcaagaccggcaagaaggttcaggccatgtggatgccgaaggcgtaaatcagacgcgccacccggcgctttgcgcggaatgcgctgcgcgccacccgtttggttccactgcggggcacgagccccgcagccggcgggcaccggaaacaaccggaccgcccgtcacactacagtccttttgaaagaggaggaaacacatggctctgaaacttctggaaggcatgaaggtcatcgagatcgccgcgttcatggcggctccgatgggcggccgcatcctgggcgaatggggcgccgacgtcatcaaggtcgagcctcccaccggcgacagcaaccgcggcatcggccttgcccgccatatctacaacggcgaccaggccggttgggactccatcaactcctgcaagcgctgcatcacgctcgacacccgcaaacccgaagggctggccatcctcaaagagatgctgaaggactgcgacgtgttcctctcgcatctgcgaccgaaggattccaagaagctgggtctggactacgagagcctgtcgaagatcaatccgaagatcatctgcggcaacacctccggctacggcaccaagggcgagtgggctccccgcggcgggttcgacgcggcctcctacgccgcgcgtgcaggctacgacttggactgccccatcaagggcgacaacccgatgatcccgtacttcggcttcggcgacatccccacgggcacctatctggccatggccgtgctggccgcctacatcgagcagcagcgcaccggcaagggtcaggaagtgaacgtggccctcatgcacgccggcatgtggagcgtgggcgtccccatcgtgaccgccgcctacggcgacgagtaccccacggatccgaactccgtgctgcccctggcccgtccgtacatgtgctccgacgagaaggccatcgccctgatgggcctgcagtggcacaattcctggcctgagttcgtgcatgccttcggcatggacgaagacctcatcgccaagtggcccgactatcagaccgcgctggccgcttctgccgagatcacgccgatcatcaccgaggtgctggccaacgtcacgcgcgacgaggccatcgagaagctcatgaccaccgatatcccgttcgacctctgccagcatttcgccgacctgcaggatgaccagcaggcttgggacgccgggttcttccagggcatagattatccttccggcaagcacatcggcatcgtcaaggctccggccatcttctcgtcgggcgaggccgagttcggtccctccggctatccgggcgagtacacccgagaggtgctcaaggaatacggtttcgacgacgcgaagatcgacgagctgcgcgagcagggtctcgtgaccgaagaggatcaatgggacaaggatcagtacaacatggagaagctgatggcccaggccgcagccgccaagaagaaggccgagtaactgctgagacgccgttagtggaaagcggatcgccagctgcgacggcgatccgatgaagtaccgttttcaaccgcgcggataccggtgatccgcgatccgcgcaaaacaaccgccaaggaggcacagaaatgatcgatttctctaagaccgaggaacaggaactgctcatcgaaagcatcaaagagcttctcgagcgcgagatgccggccgaaaaggagcgcgaatgctatcgcaacggcgagttcccctgggatgcttggaaggccatggccgaggccggcttcacgggcttgggcctgcctgaagaagtgggcggcaccgacgtcgacctcatgacggtggccctggccaacttcaccatctcccgctacggcggcccgcttgccgcgttctactccatgggcatgcccacgatgtacgacgtgtgcgagttcggcacgcccgagcagatcgagaagtacgtgaagccttacatcgcgggcggggcgccgctggccctgggcatctccgagccctccaccggctccgacgtggccggcatgcagacgtcctacgcgtgggacggcgacaccgcggtcatcaacggcggcaagcactacaccacctgcggcatggaagctccggccatcatcgtcatcgccaaggaccccacggtggacaacgtgcaccgcggcgccacgatgttcctcgtcgaccgcgacacccccggcgtcaccatcaacaagcttcccaagatgggccacgagaacgcccccaccagcatctgcgaggtgttcctgaacgacgtgcgcgtgccccgatcggctatcctgggcgtcgagcacaacggcttcatgcagaccatggcgaacttcacccgcgagcgcatcgccaacgtgtccggcgtcatcgccacggcggtcaatgcgttcgaggatgcctgcgcctacgccaaccagcgcgagcagttcggccagcagatcggtcgcttcgagctggtgcaggagatgatcatggaaatgtcctgcaagatcgagaacatgatgaacatgctgtacaagctgtgctggcaggccgatcagggccaggacgtgcgcatcctcgccggcatggccaagtactactgctccaaggccacctgcgaagtggttgacgacgccatccaggtgctggcaggtatcggcgtggtgggcgaccatcgtgtgggccgttactacatcgacatccgcagcgcccgcattgccggcggttccgaccaggtcatggtgttcaacaccgctccgcagatcctcaagcgctaccgctaggccggcagaacgagtatggggcgggccgtcggaacccgcgcccgcccctttcgacgaacgcaaggaatgggcagcgcttgctgctgcaaggaggaggtgagtaacgagatggatcgatgcgagggcataccggttgacaaacttgctttttcgaagcagcttcaacggcttgcggaagaatggggagacgagactgcgctcgtcgatgtttcccgcgacggatcggaacgggcgttttctcgccgcgagctgttcgaggccatcgagaaggttgcctgccatctcaatgctcgaaacgtccaacaaggggatttcgtcgtcatagcccttcccaacgggtacgagaacgtcgtcgcgacgctggcgtcctggcaactgggagcgtgctgcgtgttcatgtcccccaagggaaccgacgaggagcgcaaccacatacacgcgctgttcgagcggaagctgctgatatcgtcatgggactgcgacgaggacgactgcgtgtccggggacgacgttcgcgcctggatcgaaggagacttccccaacggggtggagatcctgccgttcttcgcctgcgagccgtcgcgcgccatcccgacgggagggtcgtcgggaaagccgaagctggtggtacagaaggtcaggccggcctactgcgagatggatctgtcggcctggacggcgatgaccgggcaaaccccctggtcgaagcagcttattcccggttctttgttccacaacctgtacagcaacgccacgtacattggcctgttcttcgggcagaccgtgtacctcatggagcgtttcgacgaaggccaggcgttggagctcatcgagaagcacaggatccagttcgtcgggctggcgcccacgatgatggagcggatgatgaggcatccttcgttttccagccgaaacctcgaaagcctggaggccgtgttccacagcggcggcccgtgccccgacaaggtcaagctcgcctggatcgagcgcatcggggcgcagaaggtgtacgagatgtacggcgagaccgaaatggtggccaccaccgtcatacggggcgaggagtggctggagcatcgcggaagcgttggacgcccctacgggtgcgagctgcagatacgcgacgacgaaggccgtgtgctgccggccggcgaagtgggcgagatattcggaaagcccgccatcgggctttcggcgaagtacgtggggccgcagtccctcaagtgcgaggacggcgggttcttcagcgtcggcgacctcggttggctcgacgaggaaggatacctgtacatatccgaccgccgctcggacatgatcgtaaccggcgggaagaatgtgtacacggccgaggtggagaacgccatattcgactaccccggcatcatcgatgccgtggtgataggcatcccggaccagctctggggattgaaggtgcacgcgatcctggagatagaaggccccgagagcgagttttccccggacgacctcaacgagttcctccataccaagctgagcgggtacaagtgcccgaagacatacgagatcgtgcaggacatgccccgcaatgaaatgggcaaggtccgacgtcgagaactgatcgaacagcatctgtccggtctttcggaacacgaacataacgccccggcgtagaagccgaagcgttcgtaacaaaaggagttgcaccatggcagaacgagcattgaaggcgaccttaaccgaaaaacgagacggcgtgggcatcatcacgctgaaccggcccgagaagctgaacgccatcaaccaggacatcatggatgacctgtactacctgttcgacgcatacgaggaagaccccgaggttcgcgtcatcgtcctgaccggcggcgacggcaaggccttctgcgcgggcggcgacatcgaaggcgagatccagatggacgtcgtgggctcgtaccacggcggcatcgaggggaaccgcctgaacacccgcatcgaaaagtgccggatacccgtcatcgccgccatcaacggcttctgcctgggcggcgggtttgagatggcgctggcatgcgacattcgccttgcttccgagcgcgcacgcatcggcctgaccgaagtgaacatgggcgtgatcccgggctccggcggcacccagcgcctcccccgcctcatcggccccagccgcgcgaagctgctcatgatgaccggcaaccactacaagggcgaggccgcgctggccatgggcctggtggacatggtgttcccggccgaggagctgttggaagcggccgtgaacatggccaaggagatggccgcgaagccgccgctggctttggaatacgtgaagtgggccgtgaacgagggcatgcagatggatctcgatcgcgcgctgctgttcgaatcggccctgttcgcgcacttgtacagcaccgaggatcagaaagaggccatgtcggcattcctggagaagcgccccgccgggccgttccagggcaagtagccgaaccaaacgaaaggaagagcaatggctggactgaaacttctggaaggcgtcaaagtcgtcgacatgtccgcgttcgtcgcggcgccgatggcagccgaggtactggccgagtacggcgccgacgtcgtgcgcatcgagcccttgaccggcgatggcatccgcggctcgggcatgacgcagaacatctacaacggcgacgccccgctgtacgacgccattaacggcaacaagcgccacattgcggtgaacacgcgcacggccgagggcatgggcgtgctgtggaagctgctggagacggccgacatcttcatctgccacatgcgcgagaaggatatggtcaagctgggcatcgactgggagacgctgcacgcgaagttcccggcgctgatctatgccaacaccaccggctacggcagcacgggcccgctggccagccgcggcggcttcgacatgatcgcctacgccacgcgcacgggcctcaccaccgacgtggtgcccgagggcgcgcacccctacatgccctaccaggcgcaaggcgacatccccacgggcctgtacctatccatcggcatcatggccgcctacatcaaccgcctgcgcacgggcctgggcgaccaggtgtcgtgcagcctgtacggctccggcatgatgagcgcgatggtgcccatcctctccggccagaagccctacaacaacctgtggccgaagggccgcgagaacgtccttccgttctcctgcatgtaccgcggctcggacgaccgctggatcatggtggccggcctgcagtggcataaggactggccgcgcttcgtggcgcgcctgggcctcgaccccgagctggtgacgaagtaccccgactacatgaccgcgctggcgaagtcgaacgagatcatccccatgctggacgagctgttcgccaccaagaccgtgcaagagtggagcgacatcctcaccgaggaagacatccccaacgacatctgcctgaagttcagcgaagtcgccgatgaccccgcggtgctgaccggcaacctcatgaaggaagtcgagatgcccagcggcgaggtcatcaagatgccgcgcaccccggtctacttccgcgaggccggcgcgcccgacccggtggtggcgcccacggtgggcgagcacaccgaggacgtgctgaaggaatgcggctacaccgacgaggagatcaagaagatggccgaggagaaggtcgtcggtctgggcgacacctgggatcgctccatgtacgtcatcaagttctaacgcatcgcacaggcgatttcgcggagcgcccggagaaccggcgcgggcgctccgcgcatcgatataggaagcatcacgttttgaggaggagtcagaatgctgcaagcaccgttgtatttcgaagacgtcgaggtcggctataagttccagacccccggcggccgcaccatcacgaacgccgaagtggtgaacttcgcgcagatcacgggcgactacaacctggtccacctggaccacgagttcgccaagaccggcatgtacggcgagaacatcgcccacggcgcgctgacgctgacgctggccggcggcatgttgaagcgcaccgagttctggtcggccacggccgagacgctgggcgacctcacgggcttcaagcacgtgaagttcatggccccggtgaagttcaacagcaccatccacctggagtgcgagatcaccgacaagacggacaacggcgacggcacgggcaccatcgagctggccgtgcacggcatcgaccaggacggcacgctggttctggacaacgtgcgctactacaccatcgccaagaagaactagcccgcgaacgccatcatccttaaggaggaattcgatatgaacgagcaactgcaagccgccttcgacaagaagttcaaggacacctggttcttcgaggacgtgccgctgaaccacaagacgccggccaccacgggccgcaccatcaccgaggccgacatcctcaacttcgccggcatctccggcgagtgggcccccatccacatggatctggagtactgcaaggcccacggttacgagaccacgctggcgcagcatatgctggtgtacacgttcacgccgtccatcaacccgtccgaccccatgatggctaagatgaacaactccatccttgccaccaagggtacgaagaactggaagttcctgaagatgccggccgtgggcgacacggtgtacaccacgtccgagatcgtcgccaaggacgataacaagcccgagcgcggcgtcatcatcatccagatgtcgatgatcgaccagaacggcgacgtgctgcagaccggcgagtaccacctcgtgctggcgaagaagatcttcttcgagaagcagttcgaagctgccgccgccaaggcgcagcagtagcaccccgctcgcccgttgccgcggccttggagggagggtcgcggcaacgcccgcgggcatggacatgccggtcaaacgaccgtcagggcgcaacgtttgcccggcatgtccatgccgcagaacggcaggacgataggagaagaaaggaaaggcatccatgaacatcattgttcctatcaaggtgctggccgacgatcaggacatcgtcgtagccgccgaccggagtctggacgactcgaaagcccatcgcatcgtgtccacgtacgacctgaacgccatcgaggcagccgtgcagctcgcttctacccacgaggggtcgaaggtggtctgcgtgtcggtcgccgacgcgaaagccgacgactccaagctgaagaagggcattctcgcccgcggcgtggacgagctggtcatgatcgccgacgacgcctgcgccgacctcgacgcccacgcgacggccgccatgctggcgcgccttgtagacgggctggacgccgccgacctcatcgtgtgcggcgacggctccgccgacaactacgcgcagcaggtggacgtgcagctggccgatgcgctgggcctgcccgtggttaccgccgtgtccgccgtgtcggtggagggcgccgtcgccacgtgcgaccgcatgctggagactcagctgcagaccgtgcaggtggacttgcccgccgtgatcagcgtggtccccgacatcgcgctgccccgcatccccggcatgaaggacatcctcgccgccggcaagaagccgtcctccgtgaacgccgcttccgatgtggcggccgcggtcgtcgacgtcgtggagaccaaggcaccgcagcaagcagagcgcaagatggaagtgctggacgcctcggtcgacggcgatctggagaaattcgcggccgccctcaaagcggccctgtaggaaaggtgatgtggacatgaaagcatgcgttatcgctgaaacctccgccgccgcccgcgccctgtgcgccggcgcccgcggcatggccgacgaagtggtgctgatcgcccccggcgtcgaggctctgaccggcgtggccgacaaggccgtgcatatcgacgtgccctctgaaaacgccatcgacgacgcgtacgccagcgtgaactccgtcgtggacgccgaggctccgggcatcgtcctggtcgagcccacccgctccatgaaggttctggccggcaggctggccgcccatctgggcacggcgaccatcaccgacgtcatcgagttcgaaggcgacctggccaccaccatgtacttcggcggcgtgggccagcgcaagagcaaggccagcggcacggccatctacacggtgggtgccggcgtgttcgacgaggcctccgcttcgggcaccgacgtcgtcgaggaagcccccttcaccgccccggcccgcgcgctgcgcgtgacgggaacgaaggacttgccgaagagcgacgtcgatctggctgcggccagcgtggtagtcgccggcgggcgcggtttcgctgaagaagccgacctgcagctcatgcgcgacgtggccgcgaagctgggcggcgagtgcggttgctcgcgtccgctggccgaaggcgtggactggatgccgcgcgaggcctacatcggcgtgtccggcatgatgctggcgccgaagatgtacctgggcatcggcatctccggccagatgcagcacatggtgggcgtgaaccacgcgggcacgatgttcgccgtgaacaaggacaagaacgctcccatcttcaagcagtgcgactacggcctcgtaggcgacctgaaggacgtcctgccgaagctggcggcggcgctgtagcctgcagttcgacctgaccgggaaggggtcggcaacgcccagtcgctcaaacagtcctgctcgcgcgaacagcccactgggctgttcggctcgtgcggaactcgcttggtgggcgccgctgaccccttccctccgtctgccgccctcgctaccgctgcgcggcagcagggcgcccttaccgtattggaaaagagaagagagaaagagagaggagaggaacgtggctgagaccgatttcgacgttatcgtcgtgggctcggggtgcgcaggcgccgtggcggcctacacggcggcctcggcgggcaagagcgtgctggtggtcgagcgcggctacttcgccggcgcgaagaacatgaccggcgggcgcatctactcgcacagcctgaaggaagtgttccccgacttcgagtccgaggcgccgctggagcgcaagatcacccacgagcgcatcgcccttctggacgcgcgctcgaacatgaccgtcgacttcaccagcgacgagctggcagaggagggcaaggactcctacgccgtgctgcgcgcgcccttcgaccagtggctggcctccaaggccgaggacgccggcgcggagtacatctgcggcatcgccgtggaggagctcatccgcgacggatccggcaaggtgatcggcgtgcgcgccggcgaggacgagatcaccgcgcaggtgacggtgctcgccgagggcgtgaacagcctgctgtccgagaagtgcctgggcaacccgcgccccaagcccagccagatggccgtgggcatcaagcaggtgttcgagctgcccgcctcccagatcgaggaccgcttcctctgccccgagggcgagggcgcggccatgctgttcgtgggcgactgcacgcacggcaacgtcggcggcggctttttgtacacgaacaaggagagcatatcgctcggcctcgtggccaccatctccacggccatggacgcctcgaacccctaccccgcgtaccagatgcttgaggacttcaagaaccatccggccgtggcgcccatcatccgcggcgcgaagctcgtggagcactcgggccacatggtgcccgagggcggctacggcatggtcccgaagtacgtgttcgacggctgcgtggtggccggcgagacggcgggcctgtgcatgaacatgggctaccaggtgcgcgggatggacttcgccgtggcatcgggccgcatggcgggcgaggcggcggtcgaggccatcgacaagggcgacgtgagcgaagcagggctcgcctcctataagacgaagatggagaactccttcgtcatccaggacctgcgcaccttcagcaagtggccccacgtcatggagaactgggaccgcatgttcacggaataccccgtcatggtgaaggacatcttcaacgccatgttcagcgtggacgggaagccccagaagccgctgatgaagcgcatgatgcccatagtcaagcagcgcggcctgttcaagctggccggcgaggttcggaaggcggtgaagtcgctgtgagcgaggtcaaggagatcacggtcaacgtcgacgagtacctggccatcgacaagtacgaggtggacgaggagagcgcgcacatcgagctcgtggacgaccccggcgacgaggagttcctgaagctcgtgcgcgtgtgcccggcggcgctctacaagatcgacgaggacggcaagaagtccttcgactacgcgggctgcctggagtgcggcacctgccgcatcgcctgcgagggcaccatcgtcaagaagtgggagaacccccggcccacgatgggcgtggagtaccggttcgggtaggaggagagcagcatgcgcgaaacgtacagtaccatccgccatctcctacatctggcgacggagcttgatcgcgcatgcgcgctattcctcagcacccacatcagcatcacccatgacgaagcccgcgttctgctggaactgggcgcggctcagcaatcgttgcgccccggcgcgcttgcgaagcagctgaacttgcagcccagcacgttatcgcgcgtgttgagaaacctggaaaatcgcggcttcatcgaacggcaccgcaccaccgaggatgcgcgtagcctatcgctgagccttacctacttgggagcgcgcacggcaaaagagaccgagcagacgcttgatcggttcttcgacgggctcggcaaacatttgggatacgacgacctcgacggtcttttgaatgcttttcaggacgcaaccgactatctgtcgagctgctgtccttcgtgcgaaaccccatcgtaggaaaagacgcgtcctttcccatctagcgggaaagaaaacctcggagctacgttcgtctgcgcttcatgcttcatgcgtcaagcggacgaacgcagctccgaggaagctgtcgaaaatcgcgagcgccgattgtttcacgtgaaacataaatcgtaaagtctcacaacaatgcgacaagtgtttcacgtgaaacatgttgatacggatagagcatccgttatcgcccgccgaagaccgaacccgacccctcatccgcctcgatcgttcctcgcccttactatcctcattgattgcttcacgtgaaacaccttcataatgcaaaaaaaggacggccaaagccgtccttttcgtcatcagtgagagcgaggttatttcgcagcgccgatacggcaaatcgtggtaccgcagtcggggcacttgcccttcgtgataggcttaccgttcttcgtcaggctctcaacgggatccttcatctctttcttggccttgcatttcacacaataagcttcaatagccatggctgcaaaaacacctctctgttctgtacttgagcaggacgctttcatcccgcaccttatcgtggcataccctggcaataaccagcgcatacaaacccgtattataaggcaggctgaaaaccgcccaccgaggacggataggggcacctatacattcttcaacaactccataacaaagtcggcattcgtttcaagcgtttgctcgtcaacgttttctaacacatcatcgccttgcgcaaagaacgccggtttcgctccgttcatgcctaccagatgcattgcctggtacccttgtttgatggcgtaggaagcagcgctgtccttccatttgatctgcgcgccgcccacgttcaaaccggtggcttgcgaagccttcttgatgtaacgcttcatacgcgaggacgtcttcaccgtccggtacatgccctcttgctcgatcatgcagaggtcgccagcacccaagccgtcgagatcgatgatgatagagccgcgaagctcctgctgatgttcggtgatgaatgcgcgcataccgccgttttgagcgagctccgaacccagcgcgacgaaccacacttccgtgttgatgtcggggttgcggaactggtatatctgcttgagctcggcagggacgtcgggatcatcgaaatcgagggattcagacgattcgttcgaagcgctgttgaggtcgagttcagccttctccatacgacggggcgagaaagctccgccatgccaaggacgacgctcgtcaggcccgtatccgtcatcgtattcgtcaacgccctcgtagtcgtaagagccgtcgaatccgtcttcttcgatcgtattgtactggccgttctcgtagtccgcgttgtagggatccaattgcgttgtcgcaccgggatcgacgactccctcatcctctcggaagctttcccagccgccgcgctcagctcccaccgtgcgagcatcgaaagactcatccacttcaagccactcctgaggcgaaggctcttggtctttgctcttacggcgcagacggtcgaacagacgatgaacgcgcgatttgggcatttccacgtacccggggccggcgaaggctcccgactcggtgaagttctgctcgtaagcggaatcatcagcatcgtcgatgtagatatcttcagggtcgacattatccagcagctcatcgccaataggcgcgaacgtgcccgtcgctcccgcaggaacgaacgcgcctgctgcgctgacgttcgaagttttgccctctgacgcatcggcgcggctgatcgaacccgaaagcgatggcagcatcgagcggagcgaatgcttcttctcaaccgaatcgccgctcgcgttcgtggcgttttcccccgatactctttccgtcgaatcgccgctcacgtcgatggagggaagcatgctcagcaggctcttcgcggcagatttaccagacgtctcaacatctgccaacggagcacgttgcttcggcagctctgatatgggaggcagattcgtagccgaaactcctatatcaggcaacacgataggccgatgggcagacgtttcggcctgagggacggcttcctcggtggaaacctcgtagctttcgatgtcgacgtcgattcgtccgcttgcgccgataggggcgcccgtcacgtccactcggttgccagagcgctgcatgtcggcttgagcagcgcgggcctcttcttgcaccttgcgcggatccaggaacgagggcatgggaacatcgctgatgggcggcatgtcatccagacgaagcccgcttacgtcaataggcggcatggcggttgtcgagaacggatcgccttgagcatcctcgacggcagcctcgtgcgcggcgctcgacggagcttgcaagccctcctcgccggacgggacctcgtaatcgccatcgtcagagagacgctgcgaaccgtccgcagcgcttgcttccgtcatgtgccattggggagcctgcacatcaagagaatcgttgctaccggaatcggatacatccgccgttccacgatccgagggcttgctcacctcggcgaaacttccggcgctttcgctgtcggctgcatcaagagcgcttgcgaaacgagagcgttgcaccggcttgtctgcgttacgaggcttcttcgccttctcctgagctttcttgaaccagtccggaaccccgttgctcgtttcacccgcctggctcacggcatcgtacgacgatgccgccatgccggccgtggccgccgcgatggcggccgcctcctcggcggcgcggcgagcttcctcggcagctgcagcctcggcgttcgccagagcctcctgcatggtatcctcgggaatgctggacaacgcttcgcgcgtctcgtcgcgcaactctcgatagccttcgtcagtagccgcaggcaacgggggttctttgatctggacgaggttctgagcgatatccgacgctgtaacccctgaaacgggcttgcctgacagcgcggcgatggcggctttcgctgcagccaggcgtgcttcgggagtctgcggagcaggcgcaggaggcttcacgttagcggcttcgtacaccagctgcgcgccttcaggaaccaaccccgccttgcgcgccgcatcttctccgtggatcgcagcatcggcgttcgcggccagctcggcttcgctcacacggcctcggcctacacggcgtgcgacttccagcatcacagccgtgcccgcggcgttgcagttcgctccttcgttatacgaagccagcttgtgcagcagtgcgaacaccaggggcaaagcaaccagaaccagcgcgatgcacgccagtacgttcaacacgatggcggtagcgccttcggcgttgaggaataccacgttacgaacgatcagcagcactggcaggaataccatggcgccgaacgtagcccattgcaggatgggaagaatcgagagcagcgggccgttgagctcggcgttcaccttgccgctgtcgtagcgcgacaccacgatcaccttgcgccgacgcgatccgcccgtttcggccgagtagccgggctcgtacttcgccacgacgttctggctgacacctcgtgcgaaagcgcgggacagcacgggtcggttgaacacctcggcggcgaacaggagagccgctaacagcgtgaccacgatggacactacacccgccgctggcaaaaacagtgcaagaatagtgactaccagcgtagccgcgcagcagataacgcgcggggcttcggctccgggagctccgctgaaatcttctatgattgcggaaagacccgcatccttctgcatctgctcggtaatgtacaacgccgcttgctgctcttcttcagtccccgcaggacgaggtccgatttcctgtgatagatatgcgacgtgatctagtatgtccggcatactcttttgcctttcgttgatgattctacaaggcacacataatgcaagtatacgctatttgctctccgcacccaaataatcactaataaaagcgtctgcgctgcgcgcttgtaaacgtgctgttgaataggcctttgcaacatccgccgtggcttctgcgaaggtttcgtcgatgatgaccgcaggatcttcgggaagcgatttcgcaagcaccgccgcttcggcatcggcgatgttgtaagcattgttctgagccgtggcttcttccttgttctttgccagaatcgcatcgtccgacgcgatggcataaccgagcgattcctgacgtttgccaatataatcgaagtactgcgagaaatcagccgacgcatacgtcgattgaacgtccgaaaaagcctgataagcctcatcgaaggcagccagcgcttctttcgtcttgttcttagacgcctcgacgttttcagccgtcgtctcggtgaccagctgagcggcctggcgcgccaaatcgtcgcctttcaaaacggttttccaagcacgatccacctgctcggcggcgagctgagcctccgtcgcggcgttcatgagaagctggccctgttcgacaagcgtgtagcgcgctgcgatcgccgctaccgtttggttcgcagcctccttctcgcgagcaccgttcaactccagcgagacagtgcgcgctttttcatcagcatcctgcagctttccttcgacatcctcgagctgcgcttgaatatcaacacgctgctcatcgcttccatcagcaaaaggattcttcactacctcatcgagcttttctatggtctcgtcagcctctttgacgagcagcaacgcatcgtcaagtaccgcaacgtgtccttgttgggtttgataatcgcgatagaggtacacgcctcccgcactcaacaggccggcgctcaccaccacgaccaccgcaatcgcaagccatttgctcagacgacgccgcgctttgcggagggctatctcttcttcgggagagcgttttggtttgacaggggcaaccgctagggtcgtggaagggtttttctccgtcgagccggacgaacgcggcggcggagcaatcattccaagcttcgacgtcggtccactatcatcaaccgatacgaaaccgccagttgaaaggggcaatccacgttccttggtcggcgtgggagcaggctttttccgcttgcccggaagagtgaagagcgagatgcggcctggcctgtgcttcaggccgtcgtcatcgccttccagcgcgttctttgccgcgtcgagcacgctgaacgatatctcgttcgacgtgccgcgcgtatgccttttgatatgcgcggcacgcgttatcttgtcttccctcttacccattcgtaccagccggatcgccttgctttacccgttgttggagcgctcgagatcggatacaatctcagccgccgtcatcaccttgatggtcctgctcggaagggaattaaggaacgctttgccgtagcttttcgtcaacaagcgacgatcggcgagaataagcacgcccgtatcatcggccttcctgataagtcgaccagcagcctgtttcgtctcaaggacggcggcgggtagcacgtagcgcctccacgcctgatcgtcgcgagccgcccgttcgcacgacaaaggatcggtcggcttcgcgaagggcagcttgggaatgacgacccctttgagcgtagcgcccggagcatcgaatccctcccaaaagcttttgagagcgaagagcgaaagatgctcgtccgccagaaaatcatcgcgcaaaccttttaccgacacaccccatttttgacacacgacgcgcaggtcgtcgactttgagttggggttgcacctcgtcaaagcaacgctccatctcgcgacggttcgtgaacaaggtcagcatcgagccgttctgcgcacggtgaacgtccaccagcaggcgctgcagcgcggcaagatacgcggcttcgttcggttccggcatatcgctggccacgtacactgtcatatgagcgtcgaaatcatagcttgaatccagcttgcacatctgacaggtcgaatgctccgaagcgttcaatcccagggcactttcgaatgcgtcgaatttattgtccaccgccaacgtggcagacgcgaacaccgtcgagtgcgtgcgctcgaacaacgtctcgttcatcgcttcgcccacgttgatcagcagcgcttccagcttttctgcgacgcgatctttcttgcgactcaaagtggccgcataggcatacgtttccggagccctgtccaagatgatgtcggcggcgttcatctggtctttgagctccatcgcggtcgatgctatctcgcgctggatctctgccgcgccttcgagctcttccagatatcccacgagctcctgacacacgcgcaccagcttctccgctgcttcggtcatcgctcgaccatagcttgctacctgggcaaacgttgcgctggaacgcacatctgaattgatccacagctcgacgatctcgtagccttttccctttttgttctgatcgaagaacagaaggtccttgaggtgaacggaaaattcccgcgcagcatcagcgtaggccttgcccgcagagcgcgccttgccggtaagggcgtagaacagcgaagaaccctcttccatgccgggcaccaccacacggcgctcggcacgcacgaacacgttacgggaagcctcatcggcaccgacacggttggccaggcgcgttatgtcctcggccgaaagcgacaacgagaaagcccgacgagcttcggcttcggctccatgggcctcatccaccacccaatagcggatcggcggcagcaatccaccatctgctacgagatcgcagaacagcaaactatggttggttaccacgatatcggccgcctcggcgcggcggcgcgaaccgtgcacaaagcatgaagtaccgaaataaggacacttacgccgtagacaatcgttcgccgtcgtggtgataagacgacgaggcaacacgcgatagtcgatcttcaagctgtccatgtcatcgtattcagtctgctcgataaacgacagcaaggcggcaagggagggagcctgggtctgctctttgttgccgaacagcttcgtctgcgctccttcctcgacgatatggccgatcttacgcaaacaaggatagtgcgagaaacccttgagcggagcatacgtcagagacggcctgtcagggtcggccaaccgaagcgctttttccaatgcaggcagctcatggtaaaccaactgatcgagcagggtattagtcttcgttgcaacgccaacggctatgttgttggcccgcgccgtcaacgcggcgggaaccaggtacgccatggactttccaacgcccgttcctgcttcgaccaacaggttctccgaagaagaaaatgcctttctcactgcctctgccatagcgacctgctctatgcgaggctcgaactcttcgtacaacgaccccacgagcccggtttccgaaaaggcttgaacgatatccgcatctgaagggaacgtaagcgagcgttgcggatcggccgcgatatcgtcggcgtccagctttgccgcgcgctccagcttgcccaagcggtcacgacgaagggcgcgcaaagagaatctcaaacttggtgttccacgtgaaacatcttggttcgcttccacctcgtactttcgggcgaactgctcgaataccatcctcgtcgaccactcgtcaggagtcgccatatgcgcgatctcgcacacgagcgccggcggcatcgtcgcaacgcccgccagcaggatgcggaagatggcgcaggtcgcctctacgtcggcatcggcgcggtgcgtcgacaaaggcgcgccgaaagcccgtacaagatcgagcaagcgatgcgatttcatgcggggaagcgcgattcgcgcaagatcgagcgaatcgatccaggtattctccaacaggggataaccgctgggatgacgcgtggtgaacgtacgatcgaactctgcgttatgcgcgaccaccttcgcatcgccaatgaattccacaagcttggccagtgcgtcggcgggaagcggagcatcagccacatcgctatcgtggatatcggtcaggtgcgcgacatcttccggaatgggctttcccgggttcacgaacgtgatgaaccattcgactatttcgccttgttccatgcgagctgcagcgatctgcgtcagctcatcatggttgaaagagaagccggtggtctcggtgtccagaaccacgacgttatggtcgagatcgccgaaatccatcgtcgctgcgatttcgggaagcgacgcataccggtcgcggacggcctgggaagtgccatcgcttatgaaactttgcagggtatcctgcgagagcatattttgtttatccataccgtccagcctatcatctatcatgggatcatacaaactgttacgccgacgttgacaaaaagaacggctcgaaggagagaacatgcaggctgagcgttacttcggtacgtacgcacgattcaataccctttcaaagaaagatgctgcaatcctgctcggagccgataatcctataggcgacgtgttcgagatcgtatttcaaaccgacaacggggtgtccaccgcttggatgaaaaaccgcttcggcgcgctgatcggatttctcgatgctgagctttcacgccagctgagcattctcgccgcacgcgagtggaaactgcaagccttgttatcgttcgtcgcgttcaccgaccatcccgaaccgggccactactggggccaagtcgccatcatctgctacgattccaatctcgatcaagctttcaagcctttcatagctacaacggcgcagcgtctttccgatggcgtgcgaccggaaatcgatctcggcgagcaaggtgtcgaacaggtaatctccagcaatggtaattggactccaaaacagaccgtagcatttcctccaaaggaagcgggaacggtgatcatgaagagtcgacgtaaaatgtccgagaaactcatcgagcaggggcgcaaaggaaacaagggctgctatgcggtcagctggctgttcttgctggcgctcgtagcccttgctcttttcagcctcaaatcatgcggcgcgttctagtctttcttcaagagtggaatgtttcacgtgaaacattccactcctccgtttattaactgagagcataaccgataagccgcgtacagagttcgggaaaagaaatgcccgccgcacgcgcggcatcgggaagcagcgatgttcccgtcatgccgggaatggtattcgtctccagcgtccagcacgaaccgtcttcttccaaaatgaaatcagagcgcgaaaccccttcgcacgacaacgcgcggtgggcacgaaccgcaagctcttgcaccatccgcgtcgtttcatccgacagcggcgcgggacacaagtgctgcgaaccaccgggagcatatttcgactcgaaatcgtagaaatcgcttttaggaacgatttcgattataggcaacgcttcgacttctgcgtcgccaatgaccgcaaccgtcaactccttaccttttatatagcgttcaacaagaacctctgaatcgatgtcgaacgccttctcgattgcttcgccgattgccgcagcaccttcgacgatgaacacccccagtgcgcttccttccgtgccgggtttcaccacacaatgcgcgcccagcttctcgacgatagaatccacgtcgtaagaatctcccttctgcagcggtacagaggggggagtagggatgccggcttgttcgtagtacagcttcgacttcactttatccattgccaaagcgctcgaccacaccccgctaccgatataagggagcccaatcgtttccaaaagaccctgcacggtgccgtcttccccatatttcccatgcaaacagagaaaagcaacgtcgaaaggaccgtcgatcaaacgtttcagatcctccttgtcggcaggatcgagctgcgtaacggtatatccggcttcttcaagggcccctcgcgcgccttcggccgatgcgagagacacctcgcgttccccgctctttcctccggcgagcaacgccacgcggcattcagacatgcatccttctttcatcatccttgatacgttcgttgcagtatagcaaagggatgtttcacgtgaaacaatgtataatggcggctatggataaatcaatcaaaacctattcgctgcccgaactcgcttcagtaatgaaagaactagggcagcccgctttccgcgcacagcagctgcaggaatggctctaccaacgacatgcgtccagctacgacgagatgacgaatctccctggttctctgcgagcaacccttgctgaacgttttccactcacgatgccgactgtcgtcgatcgtcagatttcgaaagacgggacacggaaataccttgttgagttcgacgacggtatccgcgtagagaccgtaggaatcccttcgcgcaacggcgatcgcttgaccgtatgcttctccacgcaggcagggtgtcccatcgcatgcgcgttctgcgcgacaggccaggaaggtttcgcgcgcaatctcacaccgggagaaatagtcgaccaagtacttatcgtccaagaagacatggggaagcgtgtcacgaacgccgtaggaatgggtcaaggagaaccgtttctcaattacgacaacaccatggccgcattgcacatccttaaccacaagaaaggtcttgaaataggagcacgccacatcagcgtctcaacctgcggggttttgcctggtttggaacgcttctctgaggaacccgagcaatttaccctcgcggtttcgctccatgcagcgcgtcaaccgattcgcgacctcattatgcctaatgttgctcgttacaaattgccttcgttgaaagaagcgcttcagaactacgtggcgaagacaaaccgccgggttacgctcgaatacatcatgatcgaaggcgtgaacgacgcacctgccgaccttaaggctcttcaaaagttctgctcgaatcttctatgccacgtcaacctcatccctatcaatgcaatagaaggttcagaattccaaccgagctcgcctgaaacgattaatctatggctttccgaaatttcaaagaaaggaacggaagctacgctgcgcgactcccgtggttctgatatctccggcgcctgtggccaactgaaaaacaccttcaagccttgcaactgaagtgtttcacgtgaaacacttcagttgcctactgttgcaacggatgcataagagaatacgtatacaaaaataagaaagccctgaatgtttcacgtgaaacattcagggctttcttttgggaacctttcgacctttaggacgctgcagctatgagctcctcgaacaacctctcgagatcttcctcatcttggaattcaatctcaatcttgttctttccgttagaagacttcacctttacgggtgtgtgcaacacatctttcaaagctttcgccaccgttttaaacgtcttaggcaacggctccttcttcgtcggggcgtcattgcgcttacccgagaacagacgcgctatagcctctgcttctcgaaccgtaagtttttccgcaacaagcttgtccgtcagcttctgacgcccttctttcgtgggaatggacaggattgcgcgtgcatgacccgccgatatcttctcctcgaacaataattgctgcgcctcttcaggaagctcgagcaaacgcaacgcattagccacagtagaacggccttttgacatagcctgtgctacttcggactgcgtgaggttacgacgctccatcatgcggcgataaccgtatgcctcttctataggattaaggtcggaacgctgaatattctccacaagagcaagctcgagcgcttgatcgtcgtccgcatccttaatgcgtaccggcacggttttcaatcctacgattttacatgcctgccaacgacgttcgcccgcgatgatctgatattcattggttccaacgggacgaacgagaatcggctgcagcagaccatccttctcgattgatgctgcaagctcctcaagcgcctctcttttgaagttcgtgcgcggctgatcggggttcgggctgacggactctatcggaacctcgtcggttcggcgctgaacaacgcttttaatagttatctggctttcaccatcgacgatcgattcctcttgcattggcgttattgtttcacgtgaaacattctgacgttcaaccacgggttcggtatgcatagggatcggcacggcagtctcttcgcgttgttgctccaccaacacccgtttaggcgtagattcgagaggggctgcttcctcaaacgctccaccaagaagcgagttcaagccacgacctaatccgcttttgttcgctttagccacgttgtaccacttcctttgcgaggtttacatacgattgcgctcccttgcccgatggatcgtattgggtgataggctggccgaagctcggtgcttcagacaatttaaccgtacggggaataagcgtcgtaaaaaccgttttaccgaaatagctgcgcacctcttcaacgacttgtcgagaaagagtagtacgaccatcgtacatagtaagaagaacaccgaagatatcaagggtaggattcagacgagttttgacacgtttcattgaatcaaggagttttgtcacaccttccagtgcgtaaaactcgcattgaattggtatcaacagcttgtccgcagcaacaagcgcgttgaccgtcaataagccgagagaaggagggcaatcgataaatacatagtcatacttgcctcgaaggcttcctacggcgtcttttaagcgattctcacgggccatctcggatacaagctctacttctgcccctgcaagatttatcgtggctggtacgagatcgagcccttcgcccacatccgggatgatgacatcctctattgcaacgtcgttcaataaaacgtcgtacacgcaattatgcacttggctcttctcgatacctaaaccacttgaagagttgccctgcgggtcaagatcgaccaacaaaacttgcttgcccaactcccctaatgcggcggaaaggttgatcgcagtcgtggattttccaacgccgcccttctgattgatgatggccatcaccttcgtctgaccaaccacgtgtttgacaggcgctttatctttgatcgtcttgataggagtaggaggaacttcttgctctaccaagggcttcacagtctctcgttcaaccacttcgatatggtcgatgatcaactcgtcctctacgatctcttcttttttatgttgcttgacagtctctgctgcttttttgtctcgtttgagaccatcgaatagtcccacagggaccccctttcttgaccgcgaacacagtataccttgtttagtgtttcacgtgaaacactcgcccaaaatgtttcacgtgaaacatcgggagcctgctagaaccaaaagtgtttcacgtgaaacaaatatagaaaccgcgttggaaaatgaggtaaacgacgtgagatccgcatagaccgcacgctagaaacctgccatatgcacgtaagaccacatctgtacaatactagataggaaaaaggaggttgctgatgaataccacgcggcgccaattgctcgcccagcgggcagaaaacatgcgtaatcaaatgacctatcccgagcgaaggctttggttttcgttcttacgagaatatcctacaccgttcgtagctcagaaagtgatcggatcgtacattgttgatttctattgcagaaaggcgcgtctcagcattgaactggacggtgatagccattataccgaaagccagaaggaatacgaccgcgttagaacaacctttctcgaaatgcttgagatcaaagagctgagattcactaataacgaagcaatggagaacctcgaaggcgtgtgcgaagcgatccacgctgaagtcctcaagcgtcgtaacgacgttcacggaagcctattccaaaaaatgaaggacaaacattagactccgctggatccgaattcaattcactatctgcgttgtctatgcgagaacgcggcgtttggcgtttactctggatccgagctaaatgcgcgtaggctgcgtgttagaattgaatggaatccgcgtaaggttagcgctagattctaatacagaatgtttcacgtgaaaacattctgtattagagcgggcgcttttgtgcgagacccgttttgcgcggaagcttcacttgcggagtacccgctttttcaaagcaaatgatccgacgacagttctcgccaagcgtaacagtacgatcggatacgagcttcatcgccaaacggtcttgcaacaacacggcatgatccagctcttcatcggacacattagccttatagcaaatgagccttccgccttcctgcagcaaagggctggcgaattccatgagtatcgacaactgcgcaagcgcccgagcggtcaccgctgcaaacgatgctggctcttcacgtgcaagatcttcgatccggccggtatacacctcaacgttatcgagtccaagcatctgaaccattgatgcaaggatcgcagttttcttgccaacagaatcggcgagaagcgtagaccgaccgctctcaatcgctaaaggaatgcccggatatccggctcccgacccgatgtcgaccagtcggccttccggtgcttcttccagttctggcagaccgacgagtgaatcttgcacatgaagaagcatcccttcatcccaggtcgagatacgcgtgatgttggtggtcttattggcttcgataaccaattccaaatgccgttttaaaaggtcttcgtgcatattcactcctctataatcgaatgccctcagtatagaggaatgtttcacgtgaaacattcccgactgagcgtttcaaatgtttcacgtgaaacatttgagcgaagcgcacctcaaacaagagtgtttcacgtgaaacactcagaatgcaaaagagaaagactctcaaccattcgtcagttgtttcacgtgaaacatctcattccctcatactcgcaaattgtttcacgtgaaacaatcgacgcaagagcaatggcaattgctttcgttgaacgaaagatggcgacgaaccgttggcaaaaggctcagctgaaaggagaccgaatgtttcacgtgaaacattcggacatgaaaaaacccgcatctttcgatgcgggtttgcaaactaaacaaggttttgggcgctagcggggcagaatcaccacgtgacgggcgctgccttcaccttcggacgcggtttccacgcggtcgtcgtcgcgcaggcagatgtgaacgatgcgacgctcgtacggcgtcatcggacgaagcttgatgctgcggttctggctagctgcgcggttcgcggaagaacgggcaatcgattccagcttctcgcgctgacggctcttgtaaccttcgacgtccacgatgaccgggtagcggaacccgatggtgcgcacggtaatcgccgacacgaggaactgcagagcatcgagcgtcttgccgtgacggccgatcagcaccgccagatcgtcgcccgtgatatcgaggatcagctcgccttcgtcgccttcgtactcgtcgatggtcacttcgcccacctcgaagtacttgagaatatcctggagcgctccgatcgccgtatcggcaatacgatccaaatcttcgtcggtcagttcagcgggttcctcattaagaggcttctcatcaaccaattcttcagccatgacagactcctcaatgtttcacgtgaaacaatcgcggttacttgcgcttcgtcgtatccttcttggtcggacggggcttcttctgcttgcgggtcacgtccacctcgataggcttcacttcgatggtttcagcggcctcggcgtcgcgcttcttcatgatgcgcatggagatctgctgctgcgcaatgcccatgagggaggacgcgccccagaacagaagcacgccggcgggcgagctccagctgatccagagcatgaacacgctcatcacagcggccatgatcatggtctgcttgcgctgcgggttgtccttgtttcccatctgcatgagaaccatgggcaaaaacgtggcgcccgcgaagatcaccataaggatcaaatagggaacaaacgttccaaaaccaacggccagagcctcagaaggcctcataaccaagctgggaaccaggttgtagaactcgtaggtggtgcccgatgtgcgcgaacccatctcgctgagcacttgaaacaacgccatgaagataggcatctgcagcagcatgggcagacagcccgccagcgggttgaacttcacctcggcgtagagcttctgcatctcttcttgcaagcgaggctgatcgtcagcgtacttgcgctgcagctcctgcatgagcggctgcaccttctgcatctgaaacgacgatttcgtctgcttgtgcatcaaaggcgagatcagaatacggaagatgaccgtcacgatgatgatggccaggccccagtcgccgcagaagtcatagaagaaatggataatgtcgaatatccagtccttaaatacgtcccacatgttcagttgttccttcctctataccaaagaagcccgtgcgacgacctcaaggaacaggatcgtagccgtgcgaacctcccggacgacaacgtagcacacgcttcaccgtgagcttgagaccccggcagaacccgtagcgctggaaggctatgagcccgtattcggagcacgtcggcgtgaagcggcagcaagaagggaacagaggggaaatggcagcgcggtagaaggtgatgagaaacaccgccactttgcacggcacctgtttcagaaatgccttcattcctctcgtccctaacgtaattcagcccgcttcaacgtctcggcacatgctgtatgcactttactataagaacccctcatgatacccgacttcgcgagaaatatcacatcgtagcccgcccacggaccgcccagttcgtgacatacggctcgcatgcgtcgtttagcgctgttgcgccataccgcattccctgactttttacccgcaataaaagcaacacgaccttgctggccgtgctgcttcgtgggtaacactatgaacgtaaggtacggcgtatgcagacgcttaccgcatgagaacagatcggagatatccccgcgggatttaatggtctccaacctaaagctctctttacacgcagagacgcttgcggcccttggcgcgacgagcagccagcaccttgcggccgcccttcgtcgacatacgagcacggaaaccgtggcacttagcccgcttacgagtgttaggttgatacgtgcgcttcatattgattccctttcatggttttagagcaacctcgaaagtatagctcacgttaccggggagtcaaggaaaactcacaagaagggttcatgattttttccaggtcgcttcgaatagaacgaacccaagggaaggtctcttcgccgtggaaaacctcgaaagtttgttctgaatgtcctcgaccatgcttggatggctattttttcaaccgttttcctctttttcgcacagctcgattgtggaaaatgttgaaaactctcgattcattcgagagccgttgtggaaatctctaacgtcatcggtttgtcaagggatattttctcattcttttacaagcctctcatcaggcataaaaggtgatcgtagttattaacaaagctttgacctggtgttatatattgcttgccaggtgattcacccatgcgaccgggcaatatgttacctaatcttcacgtaaacgaattcaaacggtcacgtcctgccggaggacgcgtttcggtccaggaagcgccaatccgcttggaagctatcaacatttttgcacgtttttcaccaacgttcgtacgttttccagaataggttcttcaacgttttccacattttctgaatagaaagtggaaaacgttgaaaagcccatgtggaaagcagtgcaggatttagaaatagatgaatacatagttttgaatgctatgaattccccaggtggatagattcagaatcgaaaaaacgctacaatacctttgaatgttgctgaaaaatgctgaatatcgaatctgaaaacggaacaccattggacaaccagattgaaaaagcagatcatcaggatgaaaccgctgatgaaaacgtggagcctttcgactacacgcatgtacacgccgtagcgcgcatcgcgctgtacgacgatcttcgcagcgccccgcgcgtgacggagatacacccggcgccgacggctgaattcattgaaagccttgcatcgaaaatttatgaacaggctaaaaacgccggagggaccattccgtacaccgtcatccgcgaagtatcggaaaacttcatccacgcgcgtttcgccgaggctaccgtgtccatcctggacgagggcaataccatccgtttcgccgaccagggcccgggcataccttataaggatcaagcgcagatccctgggttcacatccgccgtggagccgatgaaacactatattcgcggcgtggggtcgggtctgcccatcgtgaaagagtacctcgatttctcgcacggcaccatcaccatagaggacaacctgggaacaggcgccgtagtgaccatcagcctacgtgcgggcgaggcgaccgatatgccgcccgtcgaccaatcgagcgcgcttcaccctgcatcctcgcaaccatcggccatggaacccgcttacccgatgcacgaggcgccgcagcagctgcagcagcagattcctccccagcagccgatgcagcaactcgcctacccggcgcaatacggatacgcaaacccaccgtatccgcaggaagccgcgcccgcacgaccgccttacgcttacgagcccgaaccgcagtacgcgcccccgcgctatgctcagaatccttatacggcaggcgcgccctactatccccagcacggtgccccggcgcatcgcggtcagggcatgggcatgcaagcccagcatgcgatggcgccgcttatccccccgttgtcgcaacgcgagcgcgacttcctgcccatcttcctgagcgaaggagccctgggagtaacggacctgtcgcgtttgaccggcgtgccgcaatcaagcacgtacgtggcgctgtcgaaattagaggaagccgggcttatcgagaaaacggtcggacagaagcgcattctgaccgatctgggataccacgtggcaaattccctataatcggcctttacccggcttcgatctgttaatacaatcgaagcggcggcgggtggcgcccgcttgacgcacgagagagatgtttcacgtgaaacattcgcgatgcccccatcaaggaagcaagctatgaacagcgaaaaactcgagcaggtctggtccgaagtatgcggccaggtgaaaagctacaacaatatcgatccgtcgcagatcaacgcgttcttctcacgcctgcatccgcaggctatgagcgacgggttcctcatgatcaccgcggacaacgactttataaagacatggatcgagcgtcattatatcgagttcatcaaacgcgcgctgaacgatttgtatcacatgccgttcaccgtgatcatcgaagtggacatcacagccgccgagcctcccgctccggcgcctgctcctcccgccgcgcaggcagccccggcggcaaccatggcgacggcggcagaaacgcctgcgcccgtcagctctccgcagcccgcgccggctcctgccgcgaatgccgcaagttcgccgcaaatcgacgcaggccgtcccgaagcgcatagaggggcggtaggggaagaggtcgccggcgtcggcgcgaaacgagaaatagcgctcgacggccccgatagccccgcatccacgctcacgttcgagaacttcgttatcggcgattcgaaccgcatggcgtactccatggccgtggccgtggccgagatgccgggcaaggcgcacctcaacccgctgttcatctacggcaagtcgggcctgggaaaaacgcacctcatgcgcgctatccagaactacatcaacgagacgatgccgcagctttccaccatctacgtggactcggccgagctgctgagcgactacatggaggccagcgcggcgcacgacaagcagaagtccagctacaagaacttcaagacgcgctacgaggaagccgacgtgctgctcatcgacgacgttcagtacctgcagggcaagaagcagacgctcgacatcgtgttccagatattcaacaagctgaccagccagggccgccaagtggtgctgtcggccgaccgcgcgccgaagaacatcgacatcgacgagcgctaccgcagccgcttcaactcgggcggcacgttcgacatccagccccccgagatcgagacgaagctgggcatcgtgaaaagcttcgtggacgagtaccgcgagtcggaagggtcgcacgacttcaacatccccgacgacatccagatgtacatcgcggaaagctccagctcgaacatccgcgagctgaaaagcgccgtcacgaaggtgatctaccagatgacgttcttcaaccagcccgacctcaagctggacgacgtgcgcacgctgctggagaaccacttcaccggcggcccgtcgaagcgcctcaccatcgccgacattcaaaaggaagtggagaacttctacaaggtgagccacgccgacctcgtgggcaagaagcgcacgcgcaacatcatctacgcgcgccagatagccatatacctgtgccgccagatgctcgatctgccgttcaacgacatcggcaagaagttcaaccgcgaccactccaccgtaatgtactcggtgaccaacgtcgaggagaagatgaaggagaaccgcgagctgcgcgaggagctggaagcgctgcgcgggctcatcaacgagatgtagcgtacgcgcgttcggcggaaagatgactgaaacatgactgacaaattgccgaaaagcggtgcaaccctatggaaagataacaaaagcgataattgatgttgagggagggcgctcggtctgcacgatcgattcaggaagaattccaagggttgacatgcgataacgtaggttttccacatttccaccgcccttattattacaactattaaaaccttagatatattagagaagatcaagagcaaagaacaaaacccgaaaacccgcattcatacgtcatgccgatcatacgcaatgtttcacgtgaaacattcgaacctctataatgacggcagcgctcgctgcttctagagaaagggaacgtcttgaaattcagcatcaaccaatcggaattgcagaacgcgttgtccgtggtgctcaagggcatcgcaacccgatcgacgcttcccattctgtcgggcatctacctcgacgcgcacgacgacacccttacgcttcaagcgaccgacctcgagctgtccatccagtactcggtttcggcgctcatcgaggagacgggcaaggccgtggttcccggcaagctgttctccgagatcgtgaagaacctgcccgacgcagccgtgcacgtggcagccgaggacgactcggcggtcatcacgtgcgacacggcgtcgttctccatcaagacgctcgacgcggaggacttccccggattccctcacgtggacgtgcagcaggaggtgtccatccccttcacgcagttcgcttccatggtgaagcgcgtggcgcgcgtggtgtcgaaggacgagagccgcgccatcctcacgggcgtgctgatcacgctcgaggacaccacgctcaagatggtggccaccgactcgtatcgccttgccatcaccgaagccgagcttcccgaatccagcgccgaggagttccaggcggtcatcgcgggatcgttcttgcaggagatatcttcgctgccgcgctcggaggacgacctcaagctggcgctggctgagaaccagatcgtcgtcacgtaccatgacaccgtattcatcaaccgccgcctggaaggcaacttcccgaactaccgccagctgctgcccgattcctacgccacgcgcgtgagcatggacgtggggcacctcgtggccggcgtgaagcgcacgtcgctgctggggcagaccagctcgccggtgcgcttcgacatcaacatggcgtcgcagaccgtgcagctgtccgccgtggcgcaggacgtgggctcggcccaggagacgctgtcgtgcgagggcgaaggcgaggacgtggagatcgctttcaactacgcctacgtgttggacgggctgtcctcggtgagcaccgacaacgtgttcctcgaagtgcagtcgtccatgaagcccggcatcttcaaagctgacgagggcgagaacttcctgtacctcgtcatgcccgtgcgcatcgcgtaaggacgcgcgcggcatatcgtggatctggccatcgcccatatctcgtttctgaacttccgcagctacgaggcgttcgatctcgacggcatcggtccgctcacggtgctcgttggcccgaacgccgcggggaagacgaacgtcgtcgagggaataggcctgctgacggcgcaatcgtcgtttcgacatgcgcccgtcgaccaattggtgcgcgccggggctcccttcgcgcgcttggcggccgacgtcaccgacggaagccgtcagctggagctggcggtgcagatggccgaaggcaagaagaagcacctgctgaacgggaagcccaagcgcacggccgatctgaagggcctcgtgccgtccgtgacgttcacgcccgacgacctggagctggcgaagggggccatgtcggtgcgccgcgccgcgctggacgcgctgggctcgcaactgtcggccaaccactacctcatccggcgcgattacgagaaggtgctgcgccacaagaaccgcctgctgaaggacgaggcgccggctgcgctggtgggggcgatgaacgagacgctggtcacgtgcggcgcgcagctttcgtgctaccgcgccgcgctgttcgagaagctggcggcttcgatggcgtcgtactacgctgagatcaccgacgggcgtgagcggctggacgcgggcttcgtcccttcgtgggaagagcacgatcccctttcgttcgccacgcgcacgttcgggcgcgacgaggcgcgcgaggcgctggcggatgcgcttgcgcgccgcggcggcgaggagcgcgtgcgaaagcgggcgctcgtgggcccgcatgccgaccgcatcgagttcttcatcgacggcaagaacgccgccctgttcggcagccaggggcagcagcgttcggtggtgctggcgttcaagctggccgaggccacgctgatccaggacattttgcgccaaaagccggtgctgctgctggacgacgtgatgagcgagctggacgccgcgcgccgccgcgcgctggtggcgttcatctcgggcgacatccagacgttcatcaccacgacgaacctcgcctacttcgacgacgacctgctgggcggcgctcgcatcgtagagctggagaaaccgcgcgtaaccagtgaaactcctggtgaggagcgaatgtttcacgtgaaacattcgccgatcgacgcgcgatcggcgcgcggggcggctgaagagcgcggcggacggccgtccacgccaaccgaacagccttcggcgcgcaccgagggggacgcatgaggaagctgggcgacagcatcaacgagctgatggccgcgttggccgccggcgacgatgcgtcgcgcaaggcgcagcgcgccgccgccgtgaacgtggcgtggcgcaacgcggtggaggccgtgtacaaggatgccgcgcagatagtgctcgaccacgtgaacgccgtgtacatcatggccgccgacgaggtggtgaagggcgcgacgacgaaggcgtcgcatgcgggcacgggcgcgcagctggtggtgtacgctgacgacagcctcatccgctcggatctcgatgcgcgccaagagttcctcaagatgaagttgaaagaagaaggcgagcacgtggagacgttcaagatcctgccctcgcgcttcgaaatgaaggctcgccatcccttccgccgaccggaagcggatggcgcgacggcgcgctcggcgcgcacggatcgcgaggaaaccccgcgcacgcctctgtcgcctgaagaggaagctgctctcgaagccagcgtgggggcggtggagagtcccacagtccgcagggcgcttgagagggcgatacgtgccgataaaaatcgcatttagcggtctgatgcgaaaaataatgatcgaatacgagatcgcggctcgtacggcttctaaaacccttcatacttgatggattttattggtatcaaggcatggttatggtagaattttcaggttagcgcgaatcagcgctgcactcacacatcgcactataaaaggagcatgtcagtggcaaacaaacctgaccattacgacggttctgacattcaggtcctcgagggcctggaggcggtccgcaagcgtccgggcatgtacatcggctcgacgggtcctcgcggcctgcaccacctggtgtacgaggtcgtcgacaacgccgtcgacgaagcgctcgccggatactgcgacgagatcaaggtgtggatccatcaggacaactcgatctcggtcgacgacaacgggcgcggtatcccgatcgacaagcacccgaaagagaagatccccaccgtcgaggtggtgctcaccatcctgcacgcaggcggcaagttcggcggcgagggctacaaggtgtccggcggcctgcacggcgtgggcgtctccgtcgtgaacgcgctgtcttcccgcgtggaagtgcaggtgcgcaaggagggcaaggaatacttcatcggcttcgaccacggcaagacgtccgagaagctgcgcgaagtcggccccacgaagcgcggcaacggcacgaccgtgtcgttctggcccgacccggagatcttcaccgagaccaccgtgtacgatttcgacaccctggcgaaccgcttccgcgagatggcgttcctcaacaagggcctcaagatcgtgctgtacgacgagcgcgtcaccgacgccgacggcaacccgcgcactgaggtgttccagtacgccggcggcatcgtcgacttcgtcaagttcctgaacgagggcaaggaaacgctgaacaagcccatctacttcgaggccgagaacgacgacggcaccgtcgaagtggccatgcagtggtccacctcgtactccacgaactccgtcatggcgttcgcgaacaacatcaacacgcacgaaggcggcacgcacctcgacggcttcaagcaggctgtcacgcgcaccatcaacgagtacgcccgctccaagggtatcctcaaggaaaaggattccaacctctccggcgacgacacgcgcgagggctgcgcggccatcgtgtccgtgaagctgcacgacccgcagttcgagggccagacgaagacgaagctgggcaacaccgagatccgtccgctggtgcagaacgccgtgacccagggcctggccgagtacctcgaggagaacccgaccccggccaagcgcatcatcggcaaggccacccaggcgctcaaggctcgcgaagccgcccgcaaggcgcgcgagatgacgcgccgcaaaggcgtgctggactcgttcgcgctgccgggcaagctggccgactgctcgtccaagaccccggagaactccgaactgttcatcgtagagggcgattccgcaggcggctcggccaagcaggcccgcgaccgcaagacgcaggccattctgcccttgcgcggcaagatcctcaacgtggagcgcgcgggcttgcaccgctcgctttccagcgacaccatcagctcgctgatcacggctatcggcacgaacatcggcgacgacttcgacgccgaccagtcgcgctaccaccgcatcatcatcatgaccgatgccgacgtcgacggcgcgcatatccgcatcctgctgttgacgttcttctaccgctacatgccggagctcatcaaccgcggctacatctacatcgcgcagccgcccatcttcggcctcaagaagaagaactcgcgctcgccgaagatcgagcgctacatctacgacgagagctcgctgggatcggtgctggccgagtacgacgatccgaacaagttcgacgtgcagcgctacaagggcctgggcgagatggacccggaccagctgtgggagaccacaatggagccggctacccgcacgcttctgcaggtgagcatcgacgacgccgccgaagccgagcgcgtggtgagcgacctcatgggcgaccaggtggagccgcgcaaggagttcatccagaagcacgcgcgcgacgtccgattcctggacatctagcgttccggcggtctgacgaccgccggaatacctcgctgacttactacgccaacctgtaaggtaggagatttatggcagacaacaacgattctttcgacgagttcttgaatcgcgccgaagaggattacgacgcgggcgatatcgaagcggccgaggccggcgacgaagacgacgtgctggacgacgtcgagggcggcgaggacgagtcgcgccccggcgcgttcgtgtccgaggagaacaaggcgcgctcgctgatcgacctgtcgtcgatcgcgaacccgcacggctccatcgtcgagggcgccaacggcggcgagggcaccatcgtgcgctccgcctacctcggcaaggagatgcagacgtcgttcttggaatacgccatgagcgtcatcgtctcgcgcgccctgccggacgtgcgtgacggcttgaagccggttcaccgccgcatcctgtacgccatgaacgagtccggctacacgccgaaccgcccgcacatgaaatcggcccgtacggtcggcgacgtcatcggcaagtaccacccgcacggcgactccgccgtgtacggcacaatggtgcgcttggcccagccgttctcgatgcgcgtgccgctggtggacggccacggcaacttcggctccatcgacggcgacggcgcggcggccatgcgttacaccgagtcccgcctggacaaggtggccatggagctgctgcgcgacctggacaaggaaacggtggacttccagcccaactacgacgagagcctcgaagagcccacggttcttcccgcgcgcttccccaacctgctggtgaacggctcgcagggcatcgccgtgggcatggccacgaacatcccgccgcacaacctgggcgagaccatcgacgccacgtgcctcatgctggacaaccctgacgttaccaccgaggagctgatgaaggcgctgcccggcccggacttccccaccggcggcatcatcatgggcaagaagggcatccgcgacgcgtacgagacgggccgcggctcgctgaccgtgcgcgcgaagtgcaaggtggaggaaggcaagaacggccgcagctccatcgtggtcaccgagataccctaccaggtgaaccgccagcgcctgctggagaagctgggcgagctggtgcgcgagaagaagctgcccgagatcagcaacatccacgacggcgccgaccgccacggcatcgatatcatcatcgacctcaagaaggacgccattccgcaggtggtgctgaacaagctgtacaagcacacgcagctgcaggtgggcttcggcgtgatcatgctgtcgctggtggacggcgcgccgcgcgtgctgtcgctcaaggagatgctgcactactacatcgcgcaccaggaggaggtcatcgtccgccgtacgcgttacgagttggcgaaggccgaggagcgcgcgcatatcctcgaaggcttgatcatcgcgctggacaacatcgacgagatcatccacatcatccgctcgtcgcagaccgacaaggaagctgccgagcgcatgaccgagcgcttcgccttgacggacaagcagaccgccgccatcctcgagatgcgcctgcgccgcctcaccggcttggagcatcagaagatcgaggacgagctgaaagagctgctggagaggatcgcgtactacaagcgcgtgctctccgacgaccagctggtgcacgagatcatcaaggaagagctgctcgaggtgaagaagaagttcggcagcccgcgccgcacgctcttgtccgaggcggcgaaggacctcgacgtcgaggatctcatcgccgaggagagcatggtcgtcacgatgacgaaggccggctacgtgaagcgcctgcccgtggccacctaccgccagcagaagcgcggcggcaagggcatgtcgggcgtgaacctcaaggacaacgactacgtggagcacctgttcgtggcatccacgcactcctacatgctgttcttctccacgaagggcaaggtgtaccgcctgaaggtgtacgagcttcccgaggcgtcgcgccatgcgcgcggcacggccatcgtgaacctgctgccgcttgagaagggcgagaccatctcggccgtcatcgcgacgaaggacttcccgtccgacgagtatctcatgttcgccaccgagcacggcatggtgaagaagacgtcgatggacctgtacgaccgcacgcgccgcgacggcctgatcgccatcagcctgaaggacaacgaccgcctcatctcggtgaagcgcgtggctccgggcgagaaggtgctcatggtgtccagcgccggcaaggccatcatgtgggacgagggcgaagtgcgcgccatgggccgcgacaccatgggcgtgcgcggcatgaacgtgccgcccatcgccaaggtgctgggcatggagatcgcgcagcccgacaccgacctgttcgtcatcaccgagaagggctacggcaagcgcacccccatcgccgagtaccccgagcaccatcgcggcggccagggcgtgttcaccatcacgatgaccgagaagaagggcctgctggccgtcatgaagatcgtcgccgaagacgacgagatcatgatcatgtccgaggaaggcgtgtgcgtgcgcaccccggtgtcgggcatctccgagctcggccgctccacgcagggcgtgtgcgtgatgaagacggccgacaaggaccgcgtgaccgcggtggccatctccagccgaggcaagaagaagaaagcctccggcgcgcaggtggaaggcgaggagctggacgagaacgccatcgacgagcttgaagacggcgccgaaggcaccgccgagatcgagagcgtcgaagaagcagagaacgcggaaggcgacgaagagtagaaaacagcctccagcgtaaccttgaacgccccgcctcgcatcctgcgaagcggggcgttctctttttggcgcgccgcgctgctacccagcgaatgtttcacgtgaaacattcgctcccgcactgcacctgtcacgcgcccgaatgtttcatgtgaaacattcggcctctttcgcgttatcgcttgcggctctcttcgttcgcgatgtttcacgtgaaacattttctttcccgctttctcatgaatgcgaaaaacatgaaggaacccgcagccccctggcgggttgttgacgtgccgtatactgcacgcctcatgactgttatcgacggccgccgacgcggccgttcatgcgaaagggggacggaaacccatgtatcgagcagctgccgcgcacgcggcgcacctgtcgtcgaaagcgcgcggagccgcgaagcgcgcgcaaacgacgcgccgcgaacgcgccctgcgttctccggcggagaaaaccacagccggtgacgtgttcgtgctttccgtcccgctgttcgtggaactgttcatgcaaattatgatcgggaacatcaaccaattcatgctggcgccgttgggaaccgagccggccgccgcggtcggcaacgcgctgcagatcctcaacatcgtgaccatcgcgctgtcggccatgggcacggcctccaccgtgctcgtgacccgcgtgctggggaaatcgtcggcgaccagcaaggtatcggagatcgccaccgtggccctcgtggtgaacgtcgcgcttgcagcggctatgaccgcggtgctgttcctcttctggccgcagttcttctcctggctgcacatcgacgggtccatcacgggaatggcgtcgtcgttcctgctgatcgtcggctccaccacggtggtgcaaggcgcgttcttcgcgttcacggctttgctgcgcagctacgcgcgcggcgcggacgtgatgcgcgccagcctggcgatgaacgcggtgaacatcgcggccagcgccgtgctcatcggcggcgtcgcgttcgtcccggcgttcggggtggaaggcgcggcggtagcgaacgtggtggcgcgcgtcgtgggcctcgcggtggcatgccgcctcgtgctgcgccataccgatgtgcgcatgcgcctggcgtatctgcgcccgttcccctggaagacgcttcggagcatgttgggcgtgggcatcccctcgtcgggcgagcagatgaactacgacctcgcgcagatcgtcatcctgtcgttcatcaacgtgctgggcaccacggtggtcacggtgaaggtgtactgctcgatgatcgcgggcatcgcctacctgtactccatcgcgctgtcgcaggcgacgcagatcgtgctggggtatctgttcggcgcgggcaagttcgatgcggtcgcgcggcgcgtgtgggtggccgatctcatcgccgtggcgctgaccacctgcgtgtccacgctcatctggatcaacgccgacgcggtgttcggcctgttcaccgccgatccgatggtgcacgagctgggtcgccaggtgctgcttgtggagatattcctgggtatcgggcgtgcgctcaacatcgtgatggtaaaggcgctcatcgcggtgggcgacgtgaagaccccggtgacggtgaacgtcatctcgtcgtggatattcgcggtggcaggcggctatgcgctgggaatcggcttaggctggggcatcgtgggcatgtgggtggccatgtgcgtggacgagtggctgcgcgccgggttcctgctggtaacgttcgcacgcggaggatggcggcggcgcgctcaggagcggcggcccgagcctcggctcgaaacgcctccggatgccgtggagactccggccgtgtcgtacgcgaagccgtcgatgttcgtgttgaagaagcccagcgcaacgggccgtccgaaagaaccgggcgccgtcagcctgtcggcgattatggggctggcgctggccgacgacgggggcttgacgcatgggatcgttcaggccgtcatcgatgccttgacggcactgtggtaggcggcggaaagctttccgccggctgaatcggtcagccctcgaaatcttccggggcgagaccttcgagaaactttttgaactcggacagttcggcttcgctcgcttccggttccgtccgcctcagcacataggggaacgaagcacgctccagcacatcctcctcgatatagatgggagctttctgccgcacggccagcgccaacgcgtcgctcgggcgcgcgtcgaggtcgatgaggcggtcgtgctggcgcagcgtgagccgcgcgaagaacgtcgcaccctgcacgtcgttgatgaccacgtggtcgatctgcgcgtcgaggttcgtcagcgcgtcgaggaacaggtcgtgcgtcatcggccgcgagaaccgcgctttttccagcgcgatgcccatttgcgtcgcttcgttcacgcccacccagatggggatgatgcgcgactttccttcttggacgatctcctctaccggttgcagcacgatgatggacggcgacggcgccgccgagacgatcagcgtttgaacggtaacgggaatcatcggcactcctcctcgggtttcttgcgtcgcgtcgcgcgcggccggcctaccgattatagcgcttcggcagggtcgctggtcgcatcgccgtggcgtttcggtttcaagatacggacggttgtgttttcacgcgagccttcagcagctgctccatgcttcggtacgcgggcgattttgctccttgagcgtgatgaggcaaagagggattgccttcgcatcttcgcttgcgaggggaaccatccggctgcggggaagcgtctcgccaagcggggcgatgttcaccatgaagcacaccgcgtgcttgacgtagaactggcgcgacgcgtcaaacgcgagcggttcgacaatcggcgatttcagcccgtcttcgcggtacatgaccaagatggattcgttgaaatggtcgaacgtgcgcgaagatatcacgcggtagggctccagctgttcgagggatacggcgttttggcgggccagagggtgattcgcagccatgcagattcctgcgggaactgttcccatggggaagcaatcgaagccggggcggtcgagcggccctatggtgatgagcgcatcgcatgaccccgcgcgaagggcgtcaaggccggcttctcctgttccgatggatgtttcggttcgggcgttcaggtgcttgtcgaagaacgcagccatattagcgcgggctttcgcgttgttgcagaacgccggtgcgacgaggaacagccggagtttgacgggtttttcgtcacaggactcgcttatcagctccaactctcgaaacgacgaatcgacttcggcggccttttccaggaacgcctcgccgaggggcgtgagttcgatgccttgatggctgcgatcgaacaagttctctccgaattcgaattcgaggtctgccatcgacttcgacactgcctgcacggaaatgccgtgctcgcgagcggccgaggacaggctgccgcgattcgcgacgctgacgaagtacttgatctgtttgatgttcaatgaagcgttcctcttccgatgccaagctcggtgcttggtcttagcgtaccatgcatcggaatgcgcacccgagtgcacggctctcgagttggaaaaaacgctgccgttaccggatattcaaaaactggtaagaaatattcaaaaagtgcttgaccgaacttagtgattcgacgtatagtgatcaggcactttttttgggcccgtagctcagttggttagagcgcacgcctgataagcgtgaggtcgctggttcaaatccattcgggcccaccattttttgcaataaacgctccaccgtgagccgagttagccggtggagcgtttattaatttctagacgcggttttatgcagttcgcgactagccaaagaatgtgcaacttggggcattagctcagctgggagagcgcgggctttgcaagcctgaggtcaggggttcgatccccctatgctccaccatacgttattcatccgaacccccgccgagaggcaggggttcgttgcttctggtcatgatcggttgagagccctgccgcgcgcgttcaactctcagataacactgtgcgtacccggtcggagaactccgtcgcccggttccgactcgcgaacttatgagctcgctgtcgaagggacttctctttaccgaagatgtttcacgtgaaacatttgttcgtttatcatgagtcattgtgacaagtgtttcacgtgaaacacagcctcccgcggtttcgcgctgcgctcttttcccacgtgcattctgtgagcgcaagccggaaacatcgcgatcgtgcaggtggcatggtagaatcctgcttcggataccaaccgcgaaaccggcacatggggagctatgaatcgaacggaagcactgcgcattttaggactggacgatgatgccacgcccgaagatgtgaaaaccgcctacaaggaaacggtgcagatcctgcatcccgaccggttcgccagcaacaagaagctccaagatcgcgcgactgagcagttcaagaacctccaagaagcatacgactacctgaccagcggaaaaggctcgcgcacctccgctcgcgatccgcgcgccgctgccgagcgcgcccgcagctacacgtcgtccaaccaggttgaggcgcgcatggccggcgtagccgccgcacgcacgcagctggttaagcagcgcgatgtggcgcttgacgagcgtcgtaacggcattgccatgaccgctatcggcggcatcgtggcgctgatagccggccgccggccgttcggcctgttcggtatcgttgccgccattgcaagtgccgccgctgtgtggggcatcgtgcaggtcgtgtcgtcccagagaaccatcgccacgctcaacgaacatatcgccgagctcaacaaggaagagcgccgcctcgccgaggagttggacgacgtgtagccgccgtacttcgccggcggtcgtctctccttatcgtcccgatcgcccggcagcgcctgccttgtcgcccgaaacgtgcggaattcaagcggaaaacgcacctttcgggcgacaatcgtcctctgcgggagcggtacccgccgcaggccccatcgcaaggatcatcgccgcgccgatttaggcatggcttgaatagaaagaagaagaaaggcatgaagcaagagaacatccgcaacgtcgccattatcgcgcacgttgaccacggcaagaccaccatcgtcgaccgcctgctgtacgccagcggcgtgttccgcgagaaccagcaggttgacgagcgcgtgctggacagcaacgaccaggagcgcgagcgcggcattaccatcctgtccaagaacatctcggtcgtgtacaacgacgtgaagatcaacgtcatcgacacgccgggccacgccgacttcggcggcgaggtggagcgcgtgctgaacatggccgacggcgccctgctcatcgtggacgcgttcgaaggccccatgccgcagacccgtttcgtgctgcgccacgcgcttgaacagggcctgcgcatcatcctagtggtgaacaagatcgaccgtccgggcgcgcgccccaacgaagtggtggacgaggtgttcgacctcatggtggagctcgaagcatccgacgcgcagctggacttccccgtcgtctacgccagtgccatgaacggctacgcccgtttcgcgcccgacgacgacaacatggacatgatcccgctgctggaaaccatcctcaaggagatcccggctcccgactgcgagccgaacggcccggtggcgctgcagatctgcaccgtcgaccattccagcttcgtcggccgcatcggcgtggggcgcctgttctccggcaccatccataaaggcgagccctcgctggtcatcaagaacgacggcacgcgctacaacaccaacatcaagcaggtgttcacgttcgaggcgctgggtaagaaggagcagcaggaggtgcacgccggcgacatcgtggccgtggtgggcgtggaagacgctgacatcggtgacatggtgaccagccgcgagaaccccgtgcgcttcgatcccatccaggtggaagagcccacgatggccatcgtgttcgaggcatcgtccagcccgctcgtcggccgcgagggcgacatcgtgggagcgcgccagctcaaggagcgcctgatgcgcgagaaggagagcaacatctccatgcgcatcgaggagcttgaggacaagtcgggcgttgaggttgccggccgcggcctgctgcacctgtcggttctcatggagacgatgcgacgcgaaggattcgagttccaggtaggtcgcccgcgcgtgctcatcaagaaggacgagtccggccgcaagctggaacccatcgaggaggccacggtggacgtgcccagcgagtacgcaggcaaggccatcgaggtgttcggcagcgccggcggcgagatgtccgacatgtaccagcgcggcgaccagacgcacctcgtgttcaagattccgtcgcgcggcacgatgggattgcgcacccgtctgctgaacgtcacgcgtggcgaagccacgatgttccatcatttctccgagtacggcccgtatcgcggcgagatgaacgggcgcaagaacggctcgatgatctccatgtccaccgagaagagcgtcgcgtacgctctggatgcgctgcaggagcgcggccgcctgttcgtgggtcccggccaagaatgctacgaaggcatgatcgtgggcgagtcgtcgaaggaaggcgacatggtggtcaacatcgccaagtcgaagcagttgggcaaccagcgttcgtcgggcgccgacaaggctatctcgctcacgccgcccatcacgttcacgctggaagaggcgttggagtacatcgaggatgacgagctggtggaagtcaccccgcagaacatccgcctacgcaagcggatgctgtcggccaccgatcgcaagaaggctgccaagaaataatctatcactatgtaagaatgcgccctgatctgggcgcattcttacaagagggaaatagggcttcagctcgcgcgaacaggcgggtatatccctaaatctggagtggggactgtgaatcgataatgggtatattgtgcaacgcaagaacccgttttatcgcgtgtgcgagaatacagcgcagtacttatctcatgggcgatccagtaggcggtgcgatggcgaagcccatgttcgagggaagggtcatatgaagaaaacgtacatcatgaagaccgtgtgcgcggtcggtttgacggctgcatgcacatggggtctggccggatgctcgagcgatggcaatgcttcgtcgggcaccggcggtgtggcgggcacggtcaacggcgtggaaatcgccgaagacaccatcaccaactacatccagggcgtgcgcgagcagctgggtgctgacgatgaagattcgtggggcacgtggctttctcagaacgattacacccctgcttccgtgcgtgaagaagtgttcaattcctacgcccaacgcgagttactgaaggaaggcgtcgaggagaagggcatcaccgtcgagagctccgagatcgacgagcagatcgacaaggtgaaggcgaactacgacaccgacgagaagtggcaggccgcgctcgatcaggcgggaatgaccgaagatagctatcgcgctgaaatagagcagaagctcaaggagaacaagctgtacgcatcgttcgcctccgacgaagatcccagcgacgctgacatgctgcagtacgcccagatgtacgcgaccgcgtacgacggttccaagcgttcctctcatatcctgttcaattccgatgatgaagcaactgctcaggaagtgctcgacaagctcaactccggcgagcttgacttcgtcgatgcggtgaaggaatactcgcaggatccgggttctgtcgagcgcgatggcgatgtgggttggaacaaccccagcaacctggcgaaagagtacaaggacggcctcgagccgcttgagaaaggccagttgagcggtctcgttaccacacagttcggcatccatatcatcaagtgcaccgatgtgtacaaggctcctgaagaagtgacgagcctcgatcagatcccggaagagtggatatccgtcatcgcttcgtcgctgaagtccacgaagcagcaggaagcctacaagaagtggcttgacgaaaccaccgaggctgccgacatcaagatcaacgacatgcctcagggtcttccctatgatgtcgatatgtccaagtatcctgcgccgaacgccgatagcggcgcaaccgacggaactcaggaaggttcgacggacggtgccgaaggcggtgaggctgccgacggtgcttctgccgacggtaccgacgctcccgcttccgaggatcaggccgcgaccgatggcgccgattcctccgagggcaatgccgataccgccgcgggcgacaacgcctccgagcagcctgcggaagccgcctaagcttcgggaaggttggttcatctgagttcgacacggcgggcgtccttcgggaccccgccgtttcgtttctggcgtggctgcgagtttgtttgtttgacggctcaccgggttgcttgccagcctcggttgcttgtggatcgcccgtcccgaccggatgtttcacgtgaaacatccgcggccccttaggagaaccatggatatccaaacgcctcccttcctcgaactgcacaacgcggtcgtgcagcgtgcgggcgcgcctattctgacggtcgactcgtttcgactggaggaaagagagcatcttgcgttgctgggtccgaacgggtcgggaaagtcgacgtttgtgatgctgatcacgcgcgaggtgctccccttgcaccgggaagtgccgccggttcggtttcgcggcagcgagcgtgcgacccttgcggacgtgaagcggagcttgggcgtcgtctcgtcgacgatgcaggatcagatttccgtacatctgcctacggcggacgtggtggcgggagggttgtacggaacgctgggcgtcccggcgcgggtcgacgcccggcacttgcatgaagcccgtgagcgagctcgtgaggttatggagctgctgggtgttgacgagttggcggcacgcgacatcatgacgctgtccaccggccaggcgcgacgagtgctcatagctcgtgcgctcgtgcacgaccccgacgttcttgtgttcgacgagccgtgcaccggacttgatcccgaaggtatgtattacgttcggtcgagtatgcgcacgcttgcaaaagcgggaaagggaatcgtgctggtcacgcactatcccgaggatattatccccgagatcaagcgcgtcgtgctattgaaaaacggtacggtgttcgccgacgggtcgaaaggccggctcttgacggatggcgtgatgagcgagctgttcgacgttcctttgcacgtgcagcgcatgatcgccggacgttctacggagccggccacgcaaacttctcattccgctgcatcccccacgacgtctccgcgatcagccgtacctcatagcacgcttccgcgatccgttgttgacgctgcgtcgacatcttctataccctgcgcgtcgagtgcgaaatccgcctcgccctgtgtgcaagcagacgaaaatttcgatgatgctcgtgaagaggaatatttctcgcttgtgagtgcgtattagctgttgtatactacgtagctgctgcatgaccgcgcaacgcgcgagcatgctcgaccaataagcggagagatgaccgagctggccgaaggtgcacgattggaaatcgtgtgtgctccaaaagagtacctagggttcgaatccctatctctccgccagattactcccgcgcccccgaggcgcgtttcatacggggttttgccccgatcatacgcggaagggtggcagagcggctgaatgcggcggtctcgaaaaccgtttcaccggcgaccccggtgaccagggttcaaatccctgcccttccgccagtttcatcaaacaagcgccttcgggcgcttttttgtttgataggggcgccttgatggtaaaccgactgagtattattctcgaataatgcaaataaggtcattcaactggaaagataattattcagtgaatatttgtggataatcgacctctggcgtgcggcgagttctatagttgcccgagagagacagaaataagagagaaggaccctccatgaaccaggcatcccagaccctcgcgcagctcaagaaggccagcaagctcgtccgcctcgcctttcacaagaacggcccgaaaagctacaagcgcggccagggcgcgctgctgaacgcgctcgtcgacaacgacggcaccactcagcgcgagctggtgaagattctcggtctcaaccgcagcgagctcaaggatatcgtgaagaaggccgagcgcaacggctacgtcaccatcgaggacgccgaaggcgagcgtacctacgccgtgaagctcaccgacgagggtcgcgaggtcgctcaaaagcgcgtcgccgcgaacgacaagacggctgacgacatcatcggatgcctgtctgaggaggagatcgcccagctgaacgccatcaccgagaagctcatcctctcgatgaaggacaagggcatcaatggcaagaagaagggtcgcaaagcccacgagtgctgctgccgctaaatatcgcagacgggtttaatcgccgcgcatatgcgccatcgtccgagcccccggcttctcccgaagccgggggctcgtccatgcaagccgccccagcctgcgaagtccacgccttccgcagcgcccgcgcggttctgacggtcggtagccgtcgcgccgacatcggcgcggctcagctcagagctcggcggggagcggtcgtgtcggttgcggttcaacggcggatcccatccccctgcgttccgttctgtccgatgtttcacgtgaaacatttgtgctggcgagccgaacgctacggtcgagaaggtttggcacgggtagcagcaatcgaaagtcgcgtcagcagcaaatagggcggcccgtgcaagtttttcgacttcgtggcataagccatcattcacgaccaggggttttgtcctcgacgcttcgcaacgcccagtcgctccttcccgatgccgacgcaaaacgcctggtgagaaaaccggtgcttgcaaacggtttgccacgaagtcgaaaaacttgcagaaccagcccgaaaaccagcgctggcgaaacgtttgcagccgcgtgacgctcgatctcggcgccgacgaagttgagcggacgcgcctcttgcgtcccgcgtgcgcatcgtgcttgcaggttcgcgcggccaaattctgcagatacgccgaaatagcttggggcgcgaggcgaagctgcggctgcaagctctacactggttggcaacgaagtacctcttttgaaaggacaaggctatggccgatcgcgaagttgagagctctgacgtggaagttcccgagatccccgagattctggagaaagtgctcctgttctcgctcgatgaagccaaggaaaagatgacgcagggttccgacgttgtgccgttcacggcactggtggtgaaggagaacctgttcatcgagaaccatcctgccgactcggccgaggaatgcttcaacctggctcgtcatacggtggagcatgctcgcggcgccgcggcgtacgcgctgtgctacgacggctacatcgaaatcgacgacggcgtgaaggacgcgctcatcgccgagggcggcgtaccgggcgaagataccggctacgcggtgagctacctctacgaaatggacgaagagggcaacgtgacgttcgaggaagagcctgcctatgtgggcgaggcgccgaacttcatgatcgcgctgaacgacgccgattcgtacgccgaagaggatatcgacgagaagtacctcgaagaggatgcggtggacgacgaggagtagcctcgcccatccgaacgaatgtttcacgtgaaacattcgcacaaacgcaagtttctccgaatcggccgcatcctgcaaaggtgcggccgattcgcatgtgcggcttcttcggccgccagggacgccgcctcagctttcggggacgccgcctcagctttcggggacgccgcttcagctgtcgggggcgctacctcacctggcggggatgctacctcacctggcgggggcgctgtctcgggtgtcgggagaccgccggcgtttcgcgtccgcgaagcgccaaatggtttccactgcggcgaaagcgccgcccgctgcagctgcgcgtgcagctgcagcggggttttccacaacccgcgaccatcccatcgtcgcttgtgtcgcaagctccccacctgcgtcgttggtcttcaccgcgctgattcagatcgtcgactctcccgcagcgttggattcgcgctggaaaagatggcaaacggcgggtaatccgcgttggaaaacgtggcaagaaacgtggaatccgcgtgagatcggtgtgagaaacgggcaaggttgaggaggctgcgcgctggatctgcgccatataaacgtgagatgagcttggtatcatgtatgcaagatgttcggcacgttgctggaacatggtaagtatggcgaaaccatgctgaaacgatgatcgggaagattgtgttggtcgtttcggcccctgtttgctagaatagtcgggctaatcctgccccggcaatcttgccttctcagcaccggggccgtaaagaccaaaggaggtgagctgatgaaggcttatgaattgctgttttttgtcgctccgtctatcgacgaggaaacccgcgcagccgttatgaagcgtatcgacaccacgatcgctgagggcaaaggcacggttgacaacgtcgacaactggggcaagcgtaaactcgcttacgagatcaacggattgaccgatggtgactacactctcatcgatttccacgccgatcccgctgacgttgccgaactcgatcgtgttctgcgcatcaccgacgctgtggagcgccacatgatcgtcaagcgcacggaccgcgactaggagacgagcggggacctgggcaccacccagcgtccggcatgagaagaggtagacacacatgagcatcaaccgagttatcatcagcggaaaccttactcgcgatcccgagcttcgctccaccgcgagcgggcttcccgtgctgggcttcggcgtggcggtcaacgaccgccgcaagaaccagcagacgggcgagtgggaggattatccgaacttcatcgactgcacgatgttcggcgcgcgcgccgaaagcctctcgcgctacctcggcaagggcaccaaagtggccatcgagggcaagctccgctggagccagtgggagcgcgaaggccagaagcgcagcaagatcgaagtgatcgtcgacgagcttgaattcatgtcgagccgtaacagcgattcgtcgtcgtacggtggcggtatgggcggcggttattccgctcccgcagcagcccccgtggttgccgcgccggtggttgatgcctcttcttcggtttatgacgaagatatcccgttttaagcgaaacgaaagaggttagaaatgtccgattacgcgaagcagccgcgtcgcaagttctgccagttctgcaaagaggacacgcagtacatcgactacaaagacacgcaaatgctgcgcaagtacgttaccgatcgcggaaagatcaagccgcgccgcgtgacgggtgcctgcacccagcatcagcgcgacatcgcgaacgccgtgaagcgcgcccgcgagatggctttgatgccctacgcggtgcccgccatcagcggtcgcggcgaccgtcgcagccgctaggcgcaaggaggaaccatgaaagtcatcctgctccaagaattgaagggcaagggcggtgaaggcgacgtcgtggacgtggcccccggttttgccaacaactacctgctcccgcagaaggttgccatcctcgctacgaagggcaacctgaagcagctcgagcagcgcaagcacaacatcgccaagcgtgaagagaaccgtcttgccgacgccggcaagatcaaggaaacgctcgacggcgcgctggtcaaggtcgaggccaaggtgggcgaagagggtcagctgttcggttccgttaccgctcagatgatcgccgacgccatcaaggccgccaccgacgtggacgtcgaccgtcgtcgcatcgagctgggtcacgccatcaagacggccggccagcacgaggtgaccatctcgctgtaccgcgacatcaagacgacggtgaagctgttcgtcggcggcgcgggcgacgaggtcgctcctgccgaggctgaggccgaggtcgtcgaggagacgatcgaggaagtcgccgaggctcccgccgaggccgctgaatagcagctcgggaggtatccgaagtatttcgcggcagcggccgaacggtcgcagccgtagcgagacccccttcgccctttacggcgcgcgaagggggtctcttcgtttcgcaaggacggcactgttctttccgggatgtttcatgtgaaacatccctccgtgcggcggcgaaccgccgaggctgttgcgcgtggagcgtcggttgctcttcgatacgcggccgaggcttccggtaacagtggccggccccgcgcgacaagtgttgtatcatagggactcacgctattcgagagggagttcgagcatgtcttcacccgcgccgtacagcgccgacttcgcaccggaagaaaccaccgtatcggatcggcgaaagatcgatccgcagaacatcgaggcggagaaatccgtcctggccgcctgcatgctcaaccaggaagctatcgaggaagtggctccgaagctggtcaaggagaacttctaccgcatcgcccaccagcgcatctacgagtccatgatggacctgtacgtgcgccacatccccatcgaccacatctcactggccgacaacctgaaggccatgggtcagctggaggccgtgggcggcaaagcgtacctcatcgagctggcagacaacacgttcgccctcaccaactggcagaaccacctggaaatcgtcaagcgcacctccatcctgcgcgacctcatccgcgcgtcgggcgagatcgaggcgctggcctatgacgcccccgacgatttgggcgtggtggtggaagaggccgagaaaacactgttccacgtcaccgagaagcgcgtgtcctcggcgttcaagcgcatggacgtgctgctaaccgaggcgttcgaggagctgacgaagctggccgagcagaaggacgccatggccggcatccccagcgggttcaaggacgtggacgacctgttccacggcttccgtggcggcgacctggtgatcctcgcggcccgacccggcgtgggcaagacgtcgttcgcactgaacctggccacgaacgcggccaaggctggggcaaccgtcacctttctctcgttggagatgagcgcggcgcagctggtgcagcgtatcctgtgcgccgaagcccgcgtgaacctgtcgcgcctgcgcgccggccaggtgcaggagtcggactggggcgccattgccgacgcgtctaacacgctgagcaagctggacatgttcatcgacgacacgccgtcgctgtccatcttggagctgcgcgccaaggcccgccgcgagctgcgctccgccgagaagggcatcatcatcgtcgactacctgcagctcatgtcgccgccgcagtcgcgcaaagacggcaaccgcgccgtcgaggtcggcgagatctcgcgaggcctgaaggtgctggcgaaggagatggacatgcccgtcatcgcgctgtcgcagctgtcccgtgcggtggagatgcgcggcaagaagcgcccgatgctgtccgaccttcgcgaatcgggctccatcgagcaggacgccgacatcgtcatgttcatcgaccgaagcatggacgagatcgaggccgagagcgaagaccgccccgacctgggctcggccgagctgatcgtcgcgaagcaccgtaacggccccacgcgcgacatcccgctggccttcaacgccgagtacacccgcttcatggatttcatcgacgattcgcgcgtgggcggctatatgtaaagcccctgttgagccgtttcgcggtacactgggctcatgtcgaaacgcgtcacattcatccatgcatcggacctccatctgggggcgccgttccgcgggttgcgcgcgctttcgtccaaatgggcgaaccgcctgctcagcgccatcccggaatcgtacgaccgcatggtcgacgcggccattgcccgcgacgtggacttcgtggtggtgtcgggcgacatattcgactccgcgcgcccctcgtacggcgactatctgcacttcttcgaagggttggaacgcctaggcgaggcgggcattccggtgtacctgatcacgggcaaccacgatccgtacacctcgtggcagcacgacttcttctcgctgccgcccaacgccaccatgctgccgggcgaccgacccggcttcgcgctggtggagcgcgacggccaaccgctgtgcctgatcggcggccgcggctactacaaccaaacgtggccgatggacgagtgcatcgccgaaggcgtcacgcgcgaagcggccgagcaggcgctagccgtccagcatccgcacgctgcggaagccccgttcgcagtgggcctgctgcacaccggcctcaacctcgatccggtgaaagccccggtagaccccgccgtcctcatgcacgcgggcatggactactgggcgcttgggcacatccacatgaagtacgcctacccctctttcgacgacccgcgcctcgtgttctccggctgcatccaaggccgcgacatcaaggagacgggcgagcgcggcgtgttctgcgtcacgctgcgggaaggcgcgaaaaacgagctggagttcatccccacggcaagcgtcgtgtggcagcggatgcacgtggacgtgtccgattgcgcgaacctgcccgacatcaccgacaagatcatgcgcgagctgttccgcgagaacggcaaggcgcattgcgaggagatggtggtgcgcattgcgctggagggcgcgaccccgatgcacgccatgctcgaccgcgccgatgtgatcgccggcctgcgcaaacacgtgaacgatgcgtattcggcattcttctgcgacgcgttgacgaacctcacggtgccgccgcgcgacaaggaggcgctgcgccgcgaagggctgttccctgcggtgttcctgcaggtggcggacgcgcagcggcgcaatcccgacgaggccatcgcgtttttgcaggatgagttcatcaagaagaacatccagctgcccagcgcctacacgcgcaatatcgatgcattcgccgaggcggccgagaacctcgtgctcgatttgctggcccaaggggacgagcaatgaagcggtcctatctcgagcatatcaagatcgtcagcttcggcgcgttctcaaacaaagcggtgggtccgttcgccccgcacctcaacgtggtgtacgggccgaacgaagccggcaagaccacgctcgcgtcgttcgtgggcggcgtgctgttcggctgggaagaagcgcgcggcagccgcaacacctacaagcctgcgaatgcggagcgatctggatcgctgttcttcgcccagcgcgacgcgtcctccggcgtttcgtccgcgccgtcggatgcgcccgccctcgccgccccggacgggcgcgtcgccgccgtcgaagccgacggttccctcgcggcgtcagctgcgccgcttcccacgcctgaaccctctcgcgcgcccgagctcgagctctcgcgcgtgcgcaacagcgacggcttgcaaggcgacgcatccctcgtggccgacatcgacaaagagacatttcagacgatgttctccctgaccagcgacgagctgcggacgctgcgcaacaccaccgacgttacggctaagctgctcaccgccggttcgggaacgggcgcttcgcccgctcacgcgctggccaccgtgcaggaaaagctggctgagtacacttcgcgcgccgccggcgtcgagcactccatcgccaacctcacgacgcaggagaacgagctgcgcgccaagatgacggccgccgccgaggaggccgagcgcttcaagcggcaggataaggagttccgcgagctggaaccccagcgcaacgagcttctggcgcgcctcgatgctctgaacacgtctatcgagacgctgaccgtccaacgctcgaacatcgagaagctggatcacgagatagactcgctgaccgaccaggtagcgtcgctgtgcgacgaggaggacgtgctggtcacaacccattgcgccgccgaccgcagcgtgtctgagctggttgagctgccagcgtcggaagagcgcgccctgcgcgaccagatcgactcgctggcggtcgacgaggcgaaatgcgagcacgccgtcgatctggcgcaggacaacttcgcaacgtcgaaggccgcttacgaggcgctgctggaaaccgacgacgaacgcgcccaacgcgaacgcgctcgccgccagcgcagcgtgcaggtggggctgtccatcgcgctgccgctcatgttcgtgtgcacgggcttgcccctgttcattcacggccgcgagatcaccagcttgtcgttcacggcgctcggcatcggtctggtggtgttcgccatcatgctggcgctggccgcgatggtgatgctgtttcgccccaacaaggaagaggacgcgaaggaagcgcgcaagcaggacgcccagtgggtgatgctgcaagacaagaagaagctggaagcgtgcctggaaagccaggcagcgttcaggaaccgcgcccgtgcccagctggacgccgcgggcttggccgaggcgcagggatcgctgcgccgatcgcgtacgctgctggacgaggcgaaggacgcgcgcgccgagaacaacctgttccagcagcggttgcaggcgctcgtgtcgcgccgcagcgcgctggaggagagcctggccagcgcgaagcgccaacgccgccgcctgtacgagcgaatcgacctgcgcgccgagcgcaccctcgacgccgtcgacgaggctatcgcgcagaagtcgcagcagcgcatggggctcatggaggccagcgaaggcctcaaccgccgctacggcgagctcaagcaggagctttcccatgcccagcacctgcgcgacttcgacgagtacaagctgctgtaccagcagatccgcacgcgccaggacgagagcgcgcaggactacgcgcgcctgctgctggcgcgccgcatgctggaaagcgccatcgccacttgggagagcaagagccagccggaggtgtatcgtcaggccagccgcctgttgtcgttgatgacggacggccgctggacgaaggtgagcctcaccgccgagggccgcttgcaggtgaccgacgcggtgaagaccacgcgcgatcccggccatctgtcgctgggcacgtgccagcagctgtacctcgcgctgcgcatcgccctgctgatgaccgccgacaacgtgggtcgcgccgtgcccatcctggccgacgacatcctcgtgaacttcgacacgtcccgacgtgcgggcgccgcccgcgcgttggccgagctcgcccgtatgcgccaggtgatcctgttcacctgccatgaggaagtggtggaggcgttgcgggaggcggacccgaccttgaacgaggtcgaactgtagtctgcacgcgcctggattgcgttctccttgcgcgcaacctgttctcgcctggattcttctctcgttgcttcctgttctcttccccgtccgactcgagcgcttttcaatttgtcgagagttcactcccggcgcagccgctattgtcgcgcccgtcgagatgtttcacgtgaaacatcccgggcgctttgggatgcggggggggggtcggcttttccaatttgccgtgtttgcagagcttcgcgcaaaacgactcggagttttcgctgttcttcgagcaccgtaggaggggcgcggaaactcgccggttgcgttagtcggttttgctggaagtcccgtctctcttctccgcttcctcagcttgtgcgatgagctcgctcaatgggacgcccagcccttcggatatgcgatacatgacatccaaggtcggatttgcgtctccggattcgatcctcctcagcgtgagtcggttgatgcccaccataagggacaggcgttctttcgtgaggttgcacaccgcgcgctgcatcctcaccgcttcgccgaatcctgatttgtacttctcattcatgaggacagggtattgcgatctctttcccaaaacggttactatagttatcgttttggatacttttataaccattttggttagaaaagtaaggaaacgctgagcggctgacgttttcgccgtcggctggcgcatgggggggggtgccgtcttcgtcgccggaaagggggacgggtgaatctgagatcgttctgctcgcgtgcaggtctgggttatcaagagttgatcgttgacgactccttgatcaacaaagtgtacgagataacgttttcgccagcagcgcggtcctccacgttgggtatacccgacggctgtgtcgacgtgcaattcttgggaagcggtgcgcaagaggagtgtttcgttgcaggaagccttctcaaaggccatagaagcgattcttcttgttatgagcgttgttttggtattaagttcatgccgggacccaaatgttgtttctctaagctcgatgcacaggcgctatttaatcgaagaatcgaagcgtcggcgtatgtggatatcgatgttctaagggatatcgttcatctctcgctgccttttgaggagcgcgctcggttggcggcgtctcatttcgccgcaagcagtcactcggagcttttctgcgagtcggactcactggtatcttttataacgaaggtcatcttggacagggttggggtggtgcgtgtggaagacgtggtcgagcgcacgggttacagtcatacctatgtttccaagaggttcaaagaagcggttggctgcaccatgaagacgtacgccagcatcattcgcactcagaatgccatcaggtttctctctgacagtcgatataggggtgtgaccggactcgatatcgggaccggtttggggtattacgatcaatcgcatttcgatcgggaatttaaaaagtacacgacgctcgtccctggcgatattcgtgccggccgctcgacggttttgtttcattgaccttcgacagctttttaatggcgagtgtgaaaatatacaagctttcggttgccgatttgtaaagaatgagtgcgcacgcgaaccgaatccgcgtttccgatcccgaggggccctgatcggggaggcgaggcggttcgtgttccgcatcgtctttataaggaggttttcatgacaccggaaatgtgggggattttcctgcagatcgtcatcctgctcgcgttcggttactttttcacgaagaagaagattctcacgtcggacatcaagaacggtctttccactctgttgttgaaattggttctacccatcagcatcttgggttcgtcacagatcgcctatgatgcctctaccctcagcggtttcggtatcactctggtcatatcgttcgtattctactttgtgttcctgtttattttgcgtatggtggcaaagaggcttcctttgaaggacaacgccgaccgtgttttcccgttgctgtgtgtgttcggaaacgttggtttcatcgggattcccttgtccacgcaattcttcgggcctacaggtttgatgtacgccttctcgcttaatgtggcttttaacatcgccctgtttagctacggtttgatgatcctgtcgggcgagagcaaggtaagcgtgaagtcggtcctaaccgacccgtgcttgatctgcacggtggtcatgctggcgttgtacgtcgctcccttccgttttccttccttcgtcggcaccgcttttactatgaccggcaacatgatgactccgctggctatgctcattattggtcacgagatcgccaacatgaaggtgcttgatttgataaaagacggctgggcgtacgtcgtctccctcctgcgtttgctggtaattcctactatcgtgtgcgttatcttcatgttcctgcctgtggatcacgaggttttgaaggttctcgtttttcttttggctatgccgtgcggaactttgaacgtgatcctgtcgcagcagtatggaactaacccccagttcgcttcgcgtgccacaacgcagaccatgatcctgttcttgattaccgttcccatcatgctcgtcatcatcaataccttgttgtaagcgtgcaccgtccagttcgacagcgcatgaaaacgaagctaggataggagttgagctatgaagatcgatcgcgtgtattacaacggcgtcattcgaaccatggtgtccgaaggtgatacagtggaggcgctggccgttcataacggaaccattgtggccgccggtacgagcaaggagatgcgtgcaattgacgcgtgcgagtacgttgacctgcagggaagaagcgtgcttcccggtttcgctgacacccatatgcacctattccatgattgcatgggccgtattacgccgaacctaagcgggtgccatagcattccagaaatcttgagccttctcgaacagcgaaaggaaagcatcaaacctggtcagtggcttactgccgagaacatgcacctcgagttcttgaaagaggggcgttttccgaactgtgatgagctcgacagcgtttcttctgaaattcctatttgcatcggcagtttctgccaccatgttcatgtgttgaactctgcggcactggcgctagcgggtatcgatgcgtcttttcagccgatggtggctgatcatgtgggccgattcgatgacggtcgtccggacggcgtcgtacgcgaagtggtgtatcccgagcatgttgatcctgtcataccccgcatgagcttgcaggaatgcgtcgatgcggttcacgagcatttgcagtattgctcttcacttggacttacccagctcgaggtgaatcaggaggacggacccttcggtgcccgtctttataccgagatgcgtcgtcagaaggggctgccttgccaccttacgctgaattggtatcccgagtatcccaatgtccgcggtttggtgacgggattcggagatgatgatttgaaactaggcgccatcaagatgcttaccgacggcggcatcggatcggccggtgcgctcatgctcgaggattacgagaatccggtagggactcgaggcgagtgcaactacacgcaggaagagttggacgagctggtgaaaaccgcctacgacgctggtcatgacgtttcgattcatgctatcggcgacgcggcgaacgatatggtgctcactgcgttcgagcgcgcctacgatcctgcagtgggcgacgcgcgccgcttctacttcgttcatgccacgttggtgtccaacactttcatcgagcgtgcggccaagattccctgtgtaatagccatccagccggtgtggcttgagaacttcgtgaatttcggcgagctgcgcttgggtaaggaacgcgcgaaccgtctgttccagatcaaggacatgatggatgccggactcatcgtggctggcggaaccgatgcgccggtgtgcacagtgaatcccttctacggcgtcgaatgtgcggtcacccgccaggccgtcggtcgcgacgacgtgactctcggtgctgatcaggtgatctctgtgtaccaggcggtggagatggtgacgaagaacgccgcctactggtgcagcgaggagcatcgcaagggcacgcttgaggtgggcaagctggccgactttatcgtgctcgatcgcgacatcttcgctatcgatccgaaactgatccatgagacgcaggtgcagttgaccgtgttgaacggcgacgtggtgttcgagcgcgcgtagcgcaatctattcgagggtgcggaaggagcggagaagatgagacggccgagggcggtgcggcatcctgagatgccgagccttgcgacgatcgacgagggaggcgtgacttccgccctcggcttcacggcttcgggcgtgcatgcgggcttctacgagggtaacgaccgcctcgactgcgcgctggtgtcggctgacgtaccctgcccctgcgcggcgctgttcacgcgcaacgcgttcagcgccgcgcctgtggacgtgtcgcgggaccatcttcgccgcgtctcgttcggattcgtgcgtgccgtgctgatcaactcgggcaacgccaacgcgctgaccggcgagaacggcctcgaggtggcgcggcgctcggcaagcctcgcgtcgggagagctgggttgccgggaagacgaggtgctggtggcttccacgggaatcatgggctcgcgccctcccgtcgagccgttcgagcgcggtgttccgcttgcgtgcaggcgggcggcgcgcgacggcggccacgatgcggcgcgcgccatcctgacctccggcgcgcacccgaaggaagctgccgtttcgtaccgcagcaccgatgctgcgtaccggggctgcacgttcaccgtaggcggcatggcgaaaggccccgagatgctgttggtgctgaccactgacgcgccgctttctcctgcgctggcataccgggcgcttgaggagtcggcttccgcaagcttcaacaaggtgattgtcgatgccggctcgtccacgaacgatagctgcttcctgcttgccagcggctatggcgcgaagccgggaaagcccattcgcgagggcacccaggcgtttcgcgagttctccgaggccttgaaagaggtgagcggccgcctcgcgcgttgcatagcgtctgacgagcaatgtgtatcgtgcctgatcaccgtgcatgtcgtcggagccttcgacgaggccgacgccgaccgggtggcgcgctcggtcgcccattcgctggtggttcggtccaccgttgccggacgtcatgcgaactggtcgcatatcgtctcttcgatcgggtacgccgacgcgctgttcatgagagagcgcgtgtcggtggatgtcatgggcgttcctgtgctgagacgcggagcgctatgccccttcgacgagcaacggctgctgcgcgaagcgggcgatcgggagatcgttatccgcgtggaccttggggcgggcggtgcgcaaacgacgtactggactggcgatctgccgccgggctaggcgtccggacgacgggatgcgggccgtgcgaagaccgtgcggttcgcggcgcggcgtcgcggacggcgcacgcgcgaatcgacggcgcgatggaaggtgatttcggtgacggtcgaaatggtggaaattttccttcagattctgatcctgttggcgttcggcttcttgttctccaagcgcggcatcatcacggagtcgatgaagaacggcttgtcgaccttgctcttgaaggccgtgttgccgctggtcatcctgtcgtcgtcccaggttgctttcgatggatcggtgctgcaggggttcgtggtcaccatggcggtgtcgttggtcttctacgtggtggttgtcggcggcttggggcttgtccggaagcgcattcccatccctgacggcggcaaccgcatcttcgtgcttttgtgcgcatacggcaacgacgggttcatcggcataccgttggccatgcaattcttcggctcgtccggcatgttgtacgccatcgcggcgaatatcgtgttcaacatcacccttttcagcttcggcatcgcggttttgcaggacaaggcgaagcccgatatcaagggcattctgctgaacccttgtctgatctgcaccgtcgtcgcgcttgtgctgtacgcgcttccgttcaggttcccgacccccatcgcggacgcgttcaatatggccggttctatgatgacgccgctggccatgttcataatcggctacgaaatgtcgcgcatgaagctgtcggatgtggtgagagacaaatgggcgtacatcgtttccttcatgcgcctgctggccttgcccgctctggctgcggtcgtcctctcgttcgtgcccgggatcgacccgctggtggcttcggtcagcgtcttcctgcttgccatgccgtgcggcacgctcaacgtcattctgtcccagcaatacggtgcgaacccgaagttcgccgcccgggccacgacgcaaagcatgttcctgttcctgctcaccgtgcctcttatcctgatcctggtgaaggtgctgttctgactgatggggcggctcttcccgcgcgccgagccttctctcggctcgaattgtttcacgtgaaacatttgaggtccgacgcggattgtttcccgtgacgcaatccgggcgcgacacgagatgctcttcgtgggacattcgaggttgcgatgtgggatgtttcacgtgaaacatcccggatgccgcgcaggctccttctgcgatgggcgcagcatgcgatgccctgggcgagccgtgtcgataccggttttccgaccgcttgcgaccgcgttgcccgatcccttcctctgcctgccgcgccggttgaccctctgcgtgaacgcctcacccgttgccgttgtgcgcctttggcgtcggcaccctccccgccgtccggcgatcgaaccctccggaactcatgtggagacctcgaaaagaacatgtgcaaactccatttgccctccagattgatatactgtaattctgtggttcgaacaccgaaaggaaaaacagacatgccgagcacggttctgattggcgcccagtggggcgacgaaggcaagggcaaagtcaccgacctgatcgcgcgcgaatacgattacgtggttcgctaccagggcggcaacaacgcgggtcacacggtcatccacggcgacaagaagctcgcgctgcacctcatgccctccggcgtcatgtacgagcatgcggttccggtcatcggcaacggcgtggtcgttgatcccggcgtgctcatcaaggagatggccatgctggaagccgaaggcatctcctgcaagaacctcaagatctcgtgcgacgcgcatgtgatcatgccgtaccacaaggatttcgacggcgccgacgagaagcgcctgggcgagaacaagatcggcaccacgaagcgcggcatcggcccctgctaccaggacaaagtggcccgcaagggcattcgcatccaggacctgctggacgagaagatcttccgcctcaagttggaagcggtgctttcgcagaagaaccccatcctcgagaagatctacggcctgcacacctacacggtggaggagatctgcgaggagtacctgccctatgcgcgcatcctcaagccgtacatggccgagacggcccagctgctgaacgaggccgtgcgcgccggcaagtccatcctgttcgagggcgcgcagggcacgttactcgacatcgaccacggcacgtacccctacgtcacgtcctcgtcgtgctgcgccggcggcgccgccacgggcacgggcgtgggccccacggtcatcgatcgcgtactgggcatccagaaggcctacgtcacgcgcgtgggcgaaggccccttccccacggagcagcgcttccccgaggacggcggcgaaggcgaggaggccgaggtcggcgagctgctgtgcaaggtgggccacgagttcggcgtgaccacggggcgcaagcgccgctgcggctggttcgacgcggtcatcgcgcgctacgcggccgaggtcaacggcctcaccgacgtggcgctgacgaagctcgacgtgctgtcggccttcgacaccatcaaggtgtgcacggcctacgagtgcgagggcaaggtgtacgattacttccccatgcagcagagcgtgctgttccacgcgaagcccgtgtacgaggagcttcccggttggaagggcgtcgacatcaccgagtgccgcacgttcgaggagcttcccgagaacgcccagcgttacgtggagtacctggagaagatcaccggcgtgccggtcagcatcatcgctgtcggccccgatcgcgaccagaccatcatgcgaggctgggatcggtaatgttccgccgttctgtcgaacggcggaacgactcgacgctgcgaagcgccgatgcacccgatctcgcggcgatgccgacggctcgcgtaccgaagtatcccctacggggacttccttcggggcgcgcttcgccctcgccatccccacgatctcgggcacctcggcgcttctcgctgacgtatgagttcgacctgcaaaacgacgaaacgtttcacgtgaaacacttcgtcgcaatgacgtgcgacatgggaacaaatgtttcacgtgaaacagtggcaacaccagcagcactgaagcgcttttgcacgacgtaagtagtttgagggtttgaaaggacctgacatgaacatcttggtattgggtggcggcggtcgcgaacatgccatcgcgtgggcgctggcgaagtccccgcgtaccgacagcctgtacgtagcgccgggcaacggcggcacggacggcatcgcccagaacgtacccgacctgaaccccgaggacggccaggccgtgttggcgttcgttcgcgagaacgccatcgacttcgtggtcatcggacccgaggctccgttggttgcgggtgttgccgacgtgctgcgcgccgcgggggttcccacgttcggaccggacgcccagggtgcccagctggaaggcagcaagacgttcagcaagaaattcatggatgccaacgacatccccaccgctcgctacgccagcttcaccgacctcgagcctgcgcttgcctacgtgcgcgagctgggcgcgcccatcgtggtgaaggccgacggcctggccgctggcaagggcgtcgtggtagccgacgaacttgaggacgcggaagacgccgtgcgctcctgcttcgacggcgcattcggcgactcgggcaaaaccgtgctcatcgaggagtgcctgactggccccgagtgctcgatgctggcgttcgtcagcgacggcaaggcgcactgcatggccaccgcccaggaccacaaacgcgcgttcgacggcgatcgcggtccgaacacgggcggcatgggcgcgtactcgccggtgcccatcgtgacgccggacgagctggcggccatgcacgacatcatggagcgcgcagcggttgccaccgcgcgcgagttcgacaacgattaccgcggcgtgctgtacggcggcttcatgctgacgcccgaaggtccgaagatcatcgagttcaacgctcgcttcggcgaccctgagacgcaggtggtactgccgcgtctcgagtccgacctggcggatatcatgctggccgtggccgaaggacgccccgacgacatcgacctgcgctggtccgagcagtgggccgtgtgcgtggtgctggccagcgaaggctatcccggatcgtacgagaagggcaaggtcatcctcggaatcgacgaggccgagcagatcgagggcgtcacggtgttccatgccggcaccgccaagaatttcgacgacgagctggtcactgcgggcggccgcgtgctgaacgtggtggcgctgggcgactcgttcgacgacgcgcgcgagaaggcgtacgaagcgtgcgatcttatcaacttcgaaggcaagcagtaccgcagcgacatcggcaaacgcgctgcggccggtcgtgccgcttgggagaactaaatgctttcagaacgcttgctcacgtccgttgttcgcgaatgcacgaagaattacctgcgcctcgaaccgacgcaagagcgacgcgtgcccgggccgaagcccggccagaagtacatgctgtacatgcacgtgccgttctgcgagcggctgtgcccctactgctcgttcaaccgcttcccgttcgcggaggatcgcgcgcggccctacttcgccaacatgcgcaaggaaatgctcatgttgaaggacctcggctacgacttcgaaagcctgtacgtgggcggcggcacgcccaccatcatgatcgacgagctgtgcgacaccatcgatatggcgcgcgagacgttcagcatcggcgaggtgtccagcgagacgaatccgaaccacctgattcccagctacctggacaaactacagggccgcgtgcagcgtttgagcgttggcgtgcagagcttcgacaacgacctgctgaagcagatggatcgctacgacaagtacggcagcggcgaggagatcctcgagcgcatcggcgaggccagcccctacttcacgtcgctcaacgtggacatgatcttcaacttcccggcgcagaccgaggacgtgctgttcagcgacatcgagcgcgtggtggaaagcggcacgagccagaccacgttctacccgctgatggccagccccagcgtggcgcgctcgctggcgcgcaccgtgggcaaggttgattacgcgcgcgagcagcgcttctatgagatcatctccgaagtgctggccggcggcgagaacccgctgttcgagcacggcagcgcctggacgttcaacaagcgcggcacgggcgcggcaggcgaggacgcgatgatcgacgagtacgtggtggattacgaggaataccccgccatcggcagcggcggcatcacgtatttgggcaacaacctgtacgtgaacacgttctcggtgaacgactacaacgacgccatcgagcacgaccgcatgtcgctgatgggcaaggccacgttcagcaagcacgaccagatgcgctaccgcttcatgatgcagctgttcggattgcgcctggacaagcgccagttcaagaaggacttcggcgtgtccgtggagcgcggtctgccggtggagatggcgttcatgaaggcctcgggcgcgttcgaccgcgacaacgccgacgagctgacgcttacgccgaagggccgctacctcatggtggtgatgatgcgccaattcttcatcggcgtgaacaacctgcgcgatcaggcgcgcgcagccctggtgggtgaggaacgcgagcttatcttcggcgacggcaaataaccgtctgtccgcatccgctcgaacaccgaaacgcctgcgcatctgccgcgggcgtttttcgtgtgtgccgagccgcgcccggcaacgtgttccggttcgactgcgggctcgggtgtccgactgtttcacgtgaaacgcgcttgtttccgtgttccgcggagtatccaacgtagacgttttcatcggcgggcacgcgtttcggcattcctcggcaatttacgtgctatgatacaaaaccacaacgagggacgttctattgcctgataggaggaggaaacggcatagacatggccaagaggggacggcatacggagggctttacgctcgccgaacttctgatgagcgttgccatcatactcattcttgctgccatcgcctttccttccatcgtgtcggcgcagaacaacatgcgcatgttggagctgaacaacgccgcccaatccatcgcgaacgccgcccaagcccagatgacggccaagaaagtatcgggcacgtgggtggatgccgtgaaggacggcgactcttatcgcgcctgcttccccgccgcgcttgcgggctcatcccattcgcaaggcgaaacggaagatgtttcacgtgaaactctcgggtccgacgaggttgctcctccttccgcttctgctgcggagtcttccaaacgttacatgacggcggacaccgcccgcgagcagggcatcgtcccggcgctcgccgtggaggaggctgtgcgcgacgccgactatatcatcgagttcgatgccgacacggcgcaggtgaccggcgtgttctacgccgacggaaggtccggcttcttcggatcgacccctgcctccacgaacgccgcgaagacgtattacgaaaccgagggcgcctccaccgatcaggcggcgcgcatgggccacgaccccatgatcggctactatggcggcacccctgccggcgccacgcccgagaaagcgctcgcgaacccggtgatctgggtggacgaagcaacgggctgtctgatggtgcaggaccccaacattgccgcggacggaagcgcgggctccaccacctccacggtggctatcgagaacaccggcaagaacgtggcgttctcgatctccggcttgagcaacggaacaaccatggtgtcgttgtacacggccgatgacggttcggagtcggttggcttcaccaacttcgccgcagccatcaagcagcagacgcgcgacaacgcgaacgtgaagggcaatgtgtgggccatcgacctcaacgcactttcgcagctggtggcgaaggggaatgacggcaagccggcggcggatgactcgcagaaagcgaagctcaagcaggtgttcgacgcgtgtgtggcgggcgacgccctgaccgtgtcggtggagacgaaggacgcctcgcgcagctgcgtgccgggcacggctgccgcccatgtggagtggccgagccctgcgggcaagctgacgatgctaataaccaacccgtactccgtcgtcgtggccggcgagaagaacgaagcttacatcgagccgcaggtgcggtcggcggtcgcggacagcgcgcatccttccattggggcgggcttcggcaacggcgacggcgtggtgaaggacgggctgacggtcaaccccttctatgaagataaagataatcacttccgcgtttccaacgcgaacgcgcagttgaagcaggagaacccgcaggccggctaccagtcgtacgcgggaggctggatagcctcgtcgtccgtgcgcgacgacgccacgtaccggctcgagggaactgtgggcgcgtacaacaatcatgcgtaccagatttgggagctgtggatcaagcgagccgacaccggtgaatgcatgcgcgtgggctacttgaacgatggcaagtgggaatggggcgtgttcaaccagaagggggtcaactacgactaccgtttcctgaacgactgcttcacctggtacggaacgaatgaaacgggcgatgcttcgggtacccttgccggaaccgataccgatacgaacaacgtcatatccctgcgcctcgatgtgcagaagttctacgccgaggccgagaaccataagaaccacggcttggccgacgaggacggcaatgcaacggtgtacgtgcgcacggctccgaaggcatccgaagtccaggcgtacttcaacaagctggcggttcctgaaccggcttcggttgagaatccgttgaaggctgcctatctgagcggcagcgcccaggagaccggctcgcgcaccgcggataccccgtcggtcacggcacgcgccgcgttcgaaggcgagttcggcgcctcatcgtccgacgtgtcgtgggcggtgtcccaaaccacgaccgccgggttttcccaggggagcgaatacctgagcaccgccgccaccgtgccggtgcgggtgtactactccatcgcccccggggttggtttcgcgaacatcagatcttacgataacggcaacggcagcgggtacctaagcggcgtgctcagcacgcgcttgaccaacgtctcgctttggctgtatcgcggtccctctatcaacgatcttgccgttatgccacccgcccttctgaagaactacaaggggttggagttctcgtgccgccaaggaagtacgtacgacttcaagataaccacccaagaagactaccgcttctaccgggcgctcgcatacaccgtcgagaatggaagtgcgccgccatctcaatacgtcccgcacgcatcggcaagcgatgagagcgtcgcgaaaatcgccgccgccgaaaactacgaaacggacgataagctgtacacgttcaaagggtggacaaccaaggataccatgtcgggtgcagaacttctcgtcgaagcagacaagctggtttccgactacgacggactcagctaccaaggcacgacgcttgtcgcaagctacgacgagcggaagaaggtgcagccgtctttgggcatgatgtacatagaaaccggcaccgacaaaacgggttcgccggcgtacggttactatgggtatatcgagaacaacgcggctgcggtcgaaaacttgctgtccaacgagtactccgtcaccgacggtggctattacgtggtggttcccactggcagcaatcagccgaaaatgacgggcagaggcgacatcccgaactatctcaaggacttctccgacgtgctgcagggtttgtccatcgaaggaggcttatacgattgctatcgcatcacggtgagcgataaagacgtggggcaaaaccgcccgtacgacaaatataaactgaagaatcagacactgtcgttcaaggctgatattcagacaggtgcgagcacggtctccgtcgagggcacgtacacggtgaacttcgcattcgcttgcgctgtcgaaacgaatgaagaggccgccctttcatggggaacgagcgtttcgccctggaacgttcgactgggacggcagttcgtcggcaatttgacagctggaagcaacaatgtgcaggggaagtatgctcaatataactgctttatccaaacgcggaacatcgatttggccgatgcgcctgtcgtgagcacgtctaaattcactcagccgttcttaggctcgacgtacgacggaggcggcaacagcatattcggaataccgtaccgactggcacatgaagggattaccggtgagaaccagggaagaaacggtctgtttcttgatgttggcggggagagcctgattaaaaacgtgaacatcgtgctggatcccaccgatgaaggctcagagtatgtgttcgtttccacccatggaagcaaacttcgattcggactcctcgtcgggtcgattgacggagacggagccgatattcaaaactgcacggtcggcgttgccggcaaggagacggctacgcttaggatcatcaaaaagggtacaggtggcgaggcgtatatcggcggtttggtgggctatgcaagtcaagccaatgtgagcgatctatcggtcaagaatcttcgtattgaggttgtcgccgatgtcgaagcatggaaaacctctcccgcgatcgggggatcttcggctacggctcgcagttgaacatgtcgaggagctccgtcgatggcttcgcatgcgctcttttccagcctacgttcgttaacgagaaatatcccagccaaaacacgcgcatccatttcggcggtttggtcggcagcgctcaaatggcagtcattagccagaacgtgaagagcaacgcggttctgcaggttcctgccggccagttgcgagattctgttgttgctgggcggtacgttgggcaagcatcaatgagcgcggttgctcagaacgaatccgggcaggtgttcgtcaaatacggcgacccgagtgaaggcggggaaaccgttgaggtgactgccgacgtcggggtgcagtaatgacaaaagctcgcaacatccttcgtgacacttccggggcttctattgtcattgcgctggtgttcttccttatttgcggcatcatcgggtcggtggtgatgacggctgcctcggtgcaggccaaggcagcgcagacgcatgtggacttgcagcagaaagagtacgcgatgcagtcggcagcgaagctgatggctcagcagctgggcggcgaggatgctgtctgggaggagaaatcggtagtcgttaaaatcgcctacgataccgcaggtgaggcgagtgtcgatacgaatagcttgcgttcgatgatcggccagagtttctggaccgaacggcgcacgaaggacatcctcgccgcccgcgcggaggggaaggattacgtgctgggaagctccgcatccaaccggttgctcatcgaccctccaagcgaagcggggggtctcgccccggtgtacggctgtatcacggtggatcccgacctcaacatcaccgtggagttgtcgctcgattccgctttcgcggcggattccccctacaacaccaccatctccatccaatgcacgcccacgttcgatagccaaggccgcgtgacggtgatcgagtacggcgacaacaccaccgtgaagaagacggaggcggcgtgatgatcggcaaaacgacgcgtgtgctgcgcgagaaactacaagattgccacggcgacacgatggtggaggtgctggcggcagtgttcatcgcggcgctgggcgccacgatgctcgccaccatggtgacggtgtcggcaactgcttcggcccgaagccagcaggtgctgaacgcctcgtacgccgcggaggcttctttatacgattcgtcttcctacgggcctgtcgtgtctgtaacgcttccggactcttcgaccgcagttcccatcaaagtgagcgtataccagtcgggcggctatgcatactacgaggagggtcggtagcatgacgccccttctcgacaaagcgtcgcttcgatcccgcctgcgcgacacgcgggggttcatgattgcggagcagctggccagcatagtgttcatcgggcttctttgcgttgcggtgggcgtcgggctgcaggtggccatgaactcgtacacctccatcacccggcaggcgcaggccgacgcgctgctgcaacaggcggtggaggtagtgagcgacgagctgacgtacgcgcgcgacgtggagggcgagggaacgcaggcgcccgataacccgctgtacttcaccagccccacgcgtcacgagccggcggtgctgcaatcgcgcgatgccggcgaagacggcatcgaagacggcatctggctgaacgcggccggagagcagtcgcaaatcgtgccggcacgcgacggcctcgcgcccaagctggcagagctttcatacaacgcggacaacgagacctggagtttccgcatcaccatcgcatcaggtgaggacgtggcggccgaaaccgccatgaccgtgaagaggataggatcgtaaatggcgtacaaacggttgggagacgtgctgatagacgcgggcctcatcaccgaggaccagctgggacacgcgctcaaacagcagaaagagacgaaacgccgcctgggcgacgagctcatcgccgaaggcgtcatcacggaagcgggcctcatcgaggcgctgcagatgcagctgggcgtggagttcgtcgacctttcggcgatcgacctcgaccccgagctaagccgcgtgatcagcaagaacgtcgcacgccagtacaacgtggtgcccgtgcgcacttcgcccgacgaggtgtgcctggccatgagcgacccgctgaacttcatggccatcgaagcggtgaagaacgccactcggaagcgcgtcatccctatggtgaccacgcatgattcgctgatgcgcgccatcatgacgctgtacggcaacgagggtgccgcccgcgccatcgaggagatgaagcgcgacgcccgcacgacaggcgccgacgacgcctcgaccggatcgttccaaacctccacgctgggcgacgacgccgacgcgcaatcggctcccacggtgcgtctcgtgaacagcatcatcgagcgagccgccaccgagcgcgccagcgatatccacctggagccgcgcgagatcgacctgcatgtgcgcatgcgtatcgacggcgtgctgcgcacgatcctcacggtgccgaaggagctgcaggcttcggtcatctcgcgtttgaagatcatgggcggtatgaacacctcggagcgccgcgtgcctcaggacggccgcgcaaacatccgcttgaagaagcaggacatcgacctgcgcatcaacacgctgcccaccatccacggcgagacggtggtcatccgcctgctggacaagagcgaggcgctgttcgacccggcgggcatcggcctggagggcgacaacctggagaagtaccagcggctcatcggctcgaacaacggcatggtgctgatcgtgggccccaccggctcgggcaaaagctccaccatgtacacgatgatccgccagctgaacaccgattcggtgaacctcgtcacgctggaagaccctgtggaatacaacatcgacggcgtgaaccaggtgcagatcaacgagaaaacgggcatgaccttcgccagcggcctgcgcgccatcctgcgccaggaccccgacatcgtggcggtgggcgagattcgcgacggcgagacggccgagatcgccatgcgcgccgccatcaccggccacctggtgctgtccaccgtgcacacctacgacgcggcgtccaccatcgaccgtctcatcgatatcggcgtggagccgtacctcatcgccagcggcgtgcgcggcgtcatctcgcagcgcctcgtgcgcaaggtgtgcccccattgccgcgaggagtatcggcccagccccgaggagtttgaggctatcggcctgcgatacgatcccggcgtgaggttctaccgcggagccgggtgccccatgtgcttcggcacgggctaccgcgggcgcacgggcgtgttcgagatcctggtgatcgaccgcgagctgcgcagtcgcatcacgggcggcgccacgcgcgaggagctgaaggacgccatcgagcgcacgggctcgttcaagacgatggaggacagctgccgcgagctggtgctgaccggcgtgaccaccgtcgaggaagcccgcaaaaccatcaccgcgctggagtaaggaagaggacggcggatgccaaaagcgcggcgatggcagcaaaccgaaagagaaggaccacgcatgaacgttgagcacatcatagacatggcgcgccaggtaggcgcttccgacgtgcacctggtgtgcggtctgcccgtgaagttccgcctggccggatgccttgagaacgcgggcgttgacggcgacgcgccgctgtcgcatgacgattgcgagcagctggcccgccgtttggccggagacggcttcgaccgcatccagcgcatcggcgagctggatcgcgccgagaccatcgggggcgtgcgcgtgcgcatcaacctgttccgccagcaaggccatgtgagtgcggctttgcgcctgctgtccgatcgcatccccgcgctggagacgttgggcttgccgtctgcggtcatggacttcccgcgcatccagcgcggcatcgtggtggtgacgggcgaaaccggcagcggcaagtccaccacgctggcggcgctcatcgacagcatcaaccacacgcgcgccgagaacatcatcaccatggaagacccaatcgagtacgtgtacacgcccgaccagtccgtcatctcgcagcgcgagatcggccaggacaccgaaagctacagcaacgccctgcgcgccgtgttgcgcgaggaccccgacatcatcctcgtcggcgagatgcgcgacctcgacaccatccaaacggcgctgaccgccgccgagacgggccacttcgtgctggccacgctgcacacgaaaagcgctgccgactccatcgaccgcatggtggacgtgttccccgagggcttgcagcgccaggtgcgcatgcagctgtccaccacgctggtggccgtgctgtcgcagcagctgctgccgcgccgcgacggcatgggccgcgcgctggcgtgcgagctgatgatggtgacgcctgccatccgcaacctcatccgcgagggcaagacgccgcagatagccggctcgctggccacgtcggcctcggcgggcagcgtgaccatggacaacgcgctgatcgccctggcccgcaaccgcgacatcacgtcccaaaccgccatcgatgccgcgcacgacgtcgactacgtgagaaagagcgttcgctgatgccaaccttcacttacaccgggataacggccgccggccagcagatcgacggcgtggtcgaggcgttcgacgagatcgaggccatggaacgcgcgcgcgagcagtgccgtgtcgtccaaagcgtggtccccgtgcgcgagggcaaaaacctgctgtccatggacatcacgaagccgaaggccaagcagaagaaccttgccgtcatgtgcgcccagttcgccaccatcctgaacgcgggcgtgcccgccgcgcgcgccacgtcgctggtggccgaccaggtgaccgacaagtgtctgaaacgcgtgctggccgacgtggccgccgacgtggcgtcgggccacagcctggccgagagtttccaaagcaagggcgagaacctgccgcgcgtgttcatcgagacggtgcgcgccggcgaggagagcgggcatctgcccgagagcttccaacgcctgcacgggtacttcgacaagcgcgcgaaggtgtcggccaaggtgcaaagcgccatgacctaccccatcttcgtggcggtgatcgccgtggtggtgctggccatcatgatggtgatggtgatcccctcgatgacgggcatgatcgcatcgctgggggcggatacgccggccatgacccagtttttgatcgacgcttcgaacttcgtcaccgacaacttcctgctgatcgcggtggtgctggcgctgatcgtcgtgggcgtgaagctgttcggcaccacggagcgcggcaagacgacgttcgccgtcttgaagctgaggctgccggtgctgggcgcggtgggcgtgtgctcgggcgcggctcagttcgcgaacacgatggccatgctggtgacggccggccttcctgccacgcgggcggtggccatcacgtcgcgcgtgatgagcaactatgtgttgtcgcgcgaggtggggcgcttggaggctggtttggaggaagggcgcacgctgggcgagggcctggaggccagcacgtacctgccgcgcacgctggtcgagatggtcgccgtgggcgagcacaccggcgagctggaggagacgctggaaaccatgggtgcgttctacgacgacgagacgcagcgcgtgaccaacaaggcgatttccatcatggagcccgccctgcttgttttgatggcgttgttcgcgggtttcatcgtcatcgcgttgtatttgccgatgttttcattgtatgctgcaatgtaaccgttctgacaccgtttcgtgtcacagccgttactttatgcagaaaaatgtatggggatatttccggtgcccgaatggctcggataaggagaaaggaaccgatatgaaagagatgatcaagaagatgcgcgaagagcgcggcggcttcacgctggccgagctgctggtcgtcgtggccatcgtggccgtgctggtggccatcgccgtgccgctgttctccagctcgctgagcagcgccgaggacgcggtgaagaaggcgaacgagcgctcggtgaaggccgaagtgacgacgggttacctcgccgacggctttgacaagaccaagtataacaacatgtattatagcgctaacgacaagggcgacctgaccggtccggcaagcgcagcttctgaaggcgccaagtatgtgtacaaggtgacgatcgatgattccaccgataaaactaagccgacgatcacggtcacggacgtgactgacggcgagcccactaactagcgcatgaccattccccttggcatcttcaatccggcgcaggcggcgttccttctggggatcgccgccgtgctgggtgcttgcctggggagtttcgtgaactgcctggcatggcggctggccaacggcgagagcgtgttggccggccgcagccattgcacgtcgtgcggccacgtgctgggggcgctggatctcgtccccgtggcatcgtggcttgcgcttcgcggccgctgccgccactgcgggcagcgggtgagcccgcgctacgtcatcgtggaagcgctcatggccgcgctgttcgccgccatcgtcgtgcgctacgggctgtcggtgcaaacggccgcctacctggtgctcgcgtgcatcctcatggccgtggcgctggtggatctggatacgttcatcatcccgaacgggttcgtggtggcgggctgcgtgctgtggctggtgtccatctggttcatgcccgcgccgcgcgtggacgcgttctcggtgggcagcctgttctcgggttgggtgcatccgggcggcgcggtggcgctggacggcatcgtaggcgcggcggtcgtcgcgggcggcgtgctggtattgtccgtggcgttcgacaaggtgacgaaacgccggtcgctcggcggcggcgacgtcaaactgctgttcatggtggggttgttcctcgggttggcgggttctatgctgaatctgctgatggcgtgccttatggggttggcgttcgcgtttgctcaggggttttccgttccttcttcgccgggcgagggcgaaggcgagggggaaagcgtccgaacaagggcgattccgttcgggccggccattgccgcggccacggcgttcacgctgttggcggggccgaccatcctcacgtggtacgcggggttgttctgacaggatatgcagcgggctgaaaggaaaacgcgccgcatgggcaaaacgtacacgggtgtcgatatcggggacagcagcatcaagctggcggtttccgacggccagtcggtgagcaaggttgccatcgagatgctgcccgagggcctggtggccgacggacgcatcgtcagccacgacgcgatggccgacttcatcaaaagcgtggtaagaagcatcggcggcgtttcgaaggacgtagcgttcgtggttccgggctacgacagcctgttccgtcgtctgtcgcttcccgccatgaccgagaaagagctgcggctgaacctgccgtacgagttccgcgattacatatcgcaaggcaaagaccgctacgtgtacgattatgcgatgttgggcatgcgcaacgacgccgacggccagcccgaaggcatggatctgctggcggttgcggcgcctaagcaggccatcgccgactataccgagatgttccgtcgcgcaggcttgaagctgaaggtggcgctgcccgaacaggcggcgtaccagaacctcgtgggaggcaatcctcgcgcgctggctaactgctgcgtgatagacttctcccatcatatgaccaagctgcatttcttcctcgacggcgcctacgacgtggcccgcgtcatagagatcggcggcatcgacatcgatcgcgccatcgcgaacgaatacggcgtcgacgagcacgttgccgaccagtacaagcgcaccgactaccagggcgcgcagcgctccgaggccgcccgcgcggtgtaccagtccatcgcgattgaaatcgggcgcgcgctgaacttctacggcttcaacaaccccgacgccgtcatcgaggtggcatactgctgcggtggcgggctgcttctggatccgctggtagaggcggtggctgcccatgccgacttgcgcgtgtcgtccatcgtcgacgtgctgccgccgatgagcgcgccgttgggcgaggctcttcgctgtccggttgccatcggcgccaccatgaaggcggggcggtagccatggatttgaagcaggaggtgtcgctgagcgcgctgaagcgcggcaaggcgccggcgtaccccgtcaagacgtccatcaacttggtagacacccagcagcaacgcggcaacctgcttgcgcagctgggtctgttcgccatcgccctggtgctgatcggcatattcacgaagttcgctgtggtggatcccttggcggcgagcgcggcaagcagcaacgaggtttccgcagcgcaggcgcgcctggacgtgctggcggccgagaacgccgactacgcagagctgaacgcgcaatacgatcgttatgtggtgccggggttgtccgaagaagagcggaacctggtcgatcgcgatgtggttctgaacttgctgcagcagaaggtgatgggcgtaggtcacctgtcgtcgctgcgcatggagaagaacacggccacggttacctgtttgggagccgatttgaacgaggtgtccgccctggtggaaagtttggaaagcgatcagcgcgtagcgcatgtgacggtatccacggcgcagggcgagaacgatagctccacgtcggctacgatccagatcgtgttcgcggggccgctggacgtcgaaggcgacggcggctcgaaggagaagggggccggcgatggcgcggcgtagcgtgttgaaccgctcgttctccaccagcgagaaggtgctcatgctggtgctggcggtgctgctggtggtggcgtgctactacttcctggtggtgaagaacgtggccgacacgatagctgccaatgaagaccggctggcggacatcgagatcagcgtcaacgcgcaggagatgcttgcggccgatcgcgcgcgcatgaaggccgagctggaggcgttgggcgaagacggcacgctgcccgtggtggccgtgtacgacaacatccgcaacgagttgaacgaactgaacgcgctgatgggaggcgcgaccacgtacaacctctcgttcgcgcagcccaccgtggaggacaagctggtgcgccgcgaggtgaccgtgtcgttcacggtgcccgattacgcggctgcgctggacgtggtgcgcaagctggagaacggtacgtaccgttgcgagatcaccgacttctccgtgaacggcgacatgctggccgacggcacggtggacggcgtcgacgccgtgctgactgtcacctacttggaaaccacgaacggcgccgcaaccaccgccggcctcgttgaaaaagccaagtagaaaaagcttagagtcgcaggatcttctgtcatcctggcgatctattccgcttggtagctgccgatgacgaagcggttcttgccggcggctttcgcacggtagagagctttgtcggcttggcgataggcgctctggtacgaggcgattttaccgtgcagttctacgccgccgatgctgagcgtcacttcgtgttcggtgccgtactggtcggtgaacgtcacgccgcgttttacgatgccggcgcaagcgctggccaaacgctcatcgtcgatgcgtccgttcacgcagatggcgaactcgtcgccgcccaggcgtccgatcaggtcttgcggcctgaacgcggccgtcagcgccgcggccgtctgttgcagcgctcgatcgccggcaaggtggccgtacgtatcgttcacgcccttgaagtcgtcggtgtccaccaccagcacggctccggcggtgccgtttgacagcagctcccctgccgtttcttggaacgtttgccagttcaacaatccggtgaggccgtcgtggtgggcgcgttcggacaagtccatcttctcgcgcatttcatcgtcgatgttggcgattttcccgattaccgagatgggtttgcccgcatcgtcctccacgaaatgggaagtgatgcgtatccacttcctatccttgtcgggattcgcttcctcgtggcacagcacctcggtcacggcgttcgacggcgaggtgaacgcatccagcagctcggggttcgcactgtgcttgatgagctggcgtgcgttctcgtacgagacgtaggaggatccgtcgtccatgctcgtggcatcgtcaacgtaggagctggaaagaagcgatttcgacttcgaaatgcgcagggtgtccgattttatggaatactcgaagaactgctcgtttgccaggcggtacagctcttgaaagcgcaaattctcttcgcgtacggcgcgcgccgcatgcatgcgggagcgcaggtacagcgcaagcagaacgatgatgagcaccagcagcgatatgcacgccagcgcgaattctcccaggtgatccttgatgaacaggttgatctgctcgtcctggtcgatcagcgagttgtcatagatgatggagtccagctgggcactgttgaggctgcgcagcgctttgtttaagatgaccagcaaatcggggtcaaccggctgcgcgaggccgaagcagatgtcgatggattgcgtcgaggtgggcaaatagaggatgttgctcagttcgtcgatgttgaggtagtacggcgtggtgtacgacgtgccgtaggtgtagtcgacttcgccggagttcaccgcttcgaggcattcttcaatagtgtcgtacagctgcaccggcgcgccttcaggggcggtttcagcctggtcccataaaagtgcgatgcttttgccgtccaggcgatcggggtctacgaacttgttgtataccagcagtatggaggtggtcatgtacggagccgtcatggctacgatcttgtcgatttccgtgttgtcgtcgtcgttcacgccggcaacgatgtcgatgttctcctcgcgcagcgcagtggccaaatcgtcatagcgcggtatgctcaccacttcgaacgatagccccgtgtgcttcgagagatattccagaatgcccttcgtaacccctttaaactcgccggtttccgggtcgaacgactgcagcggcggcctgtcggtgaggacgcctacgcgcagcgttttgtagttgcgcgcgtaacggagttcggcgctggtcagatcgtagttgtcctccgaggggaggaagtgcttcttgtacagggtttcctggagctgggggttgctttggttgatgcggtcgatggtggcatcaagctcgtcgatgatcgagcgctcgcccttaggcgcggcgaagaagaagggccgtccagcgaacgacgacacgatatggaacccgtcgaagatgttgacgtcgatctcgaggaacacgtcggcttcgccggttaaggttttgtcgagcagctcttgcgtggtggagcattcgacggtgaccaggttgatgccgttctgatcgcagtagtactcgagctccgcgcggcgcttcttcgcggtggcgaggatggccacgcgcagctcgcttcgggtgaacagattggttttcgagacggtggcatgtatgttcggagcgaacagggcggtgtgggccgagccgtagctgttttcggggtattcgtacatctcggcaagggcggcgctgtacgacatgcttccttcgatgtccacctcgccgttgtccagcatctctaaaagccgcaaagcgcgttcgtttgcattgtcgccctcggcttccacgaactcgaacgaccagccggtgaactgggcgacgcgcatgaggtagtcgtaggtgtagccttcataggtgccgtcatcgttttttgcgagcaggccttcgctgtcggtgtaacccaccttgacgatgcgtggctggtcggaggcatgagcttcttcagtggtgaccggtataagaagcgcgcaggctaaaaccgccgagagcagcactctcgtgcataagcgcaaggcagtcgtatgtgatctcttcttcgtcgtgcttccttgttccgggtggaatatcggggttacagtatagcctcttttttcaaataattcgcacggggggtgctgcctgtgcgcgatcatttgcgtgttccgcacggatgtttcacgtgaagcatccgtgcatggccgctcgacagcagccgggcgcgcaaaaaagcgcccccgaaagggagcgcttctgcattcgaatggtggtcggagggggacttgaaccctcgacacgcggattttcagtccgctgctctaccaactgagctacccgaccacgatcaaccgtccatggggacgtgggacgatattctaccatatcccatagcctcagcaagaggaaattcccaaaaatccccctctgcttaccgggccgcctgcttggaagcccggcgcgcatccatcggccgcctgtccgcacacctgtcggcgtacctgccgcgccgttcttctagcgataaacgatcttgccaaccgtcacgccctcggcgatcattgcgacgccgcgccacagcacgaacacggctacgagcagagagaataagatcggcgagacgaacagcataatggcgcacacgatgttgacgatgcccgagaacaggccgatcccccatgctgagaagccgatgcttttcgatttcatcgccgcgaatatctcgaacaggccgaacacgaggaagcacagggccaccagccacgagatggccgcgccgcccaccagcggatgcagcacgaacatcaggccgatcagcacgtcgaggatcgcgtaggccaatgaccatcccgacacgctcatcatagacctgaagcgcacgtagaacacgatgcccagcacgcctgagagcaggaagcccacgcccgcgatcatggcgatggtggccagcgtcaagttcggcgcgaagcagcagagcaggccgcatgcgagcagcaggattcccgccagtatcaggctccagtcccatttcttcttcaatgtcgccatgagcgctcctcctcgtcttgcctttcggcatgcgtttctctgacgcattgtatcaccggcttgcgagcgttcgagcgtttgtgcgcgaagggcggcttgacggcgcgaatcgccgattcgccatacaagagccttcgccatacgaaaaagccccggtctcctcaagcggtttgcgatgaactgcgtgaggagaccggggcgaggcgtgggccgagggtcgttatgcggtttgttttcccggagcagcgtcgacgtcgtcgtcttccacgcgtccgcggatcttcttgacgctgcggccaagcatgccgccgagcttcggaaggttcttcggtccgaagatgataagcaccaccaccagaataagtatgagctcaggcatgcccattccgaatatcttcatcgtgtgctccttccgggcttcctcgcgttcagtgccgagcattatagcaactttaaatttgtagttactataattttgtagtaaaaccgacaatttcgacgaaaagcgcggacggctcttataatgcagagcaaacggcacggcgaatcgcggagggcggacgatggaacagcggcaggcggacggcgggcagtcgatgggattgcgcgagcgcaagcgccgcgccacgcgggacgccatcgagcgggcggccatcgccttggtgagcgagcgcggctacgacaacgtcaccgtggctcaaatatgcgagctttcttccgtatctcaaggcacgttcttcaactacttccgcacgaaagacgcggctatcgtgggcatcggcgagtacgacctcgatgccgactctgtgcgcgccgcattcgatcgcctcatgccctgctcgatgctgcacgccacgctcaccttgttcctcgaggtggcgggatcgttcgattgggaaagcgatatcgcggcgcagcggatcgcgctcgtcagtgaaacgccctcgctcatgcagctgttcttggacaacgcgttcggcttcgtcagcgattttcgcactatcgtggaggcgtattttgaagcgaatccttcgctgcgcacatgctccgatgttctgagctcggcggaagagtcgtacatcgtcgtgtccgaggcgcttgaagccgcgaagttcgcgctgtaccgcgtcgccgacgatccggcgtccggcctgcccagtgcagacgaagtagaagcggtgatcaggcgcatcgtgggatagcgcccacggcggcggttcgctacactgaatgcgaaccagttacggcgacagaaggagtgcgaatgtcctgcgaacagaacagcccggtagtcggcatcatcatgggatccgaaagcgacatgcccgcaatggagccgtgcatgaagcagctcgacgagttcggcgtgccctacgaggtgaaggtggctagtgcgcaccgcaagccggccgaggtgcacgagtgggcaagttcggcgcacgagcgaggcatccgcgtgatcgtggcggcggcgggcaaggcggcccacctgggcggcgtcgtggcggcgtacacgccgaaccccgtgatcacggtgcccatgaagaccagcgacctgggcgggttggactcgctgctgtccatggtgcagatgccctccggcgtgcccgtggcctgcgtcgccatcaacggtgcgaagaacgcggccatcctggccgtgcagatcctcggcaccggctgcgacgccgaccgtcagaagatcatcgacttcaagcgaggcatggccgacgcgtaggcggcgtcctgctcgaacggttgcaacgtgcggccggatgcgacctgcatccggccgcgctgtttcgttagaacgctcgcgttgccacgtagtcggtgacgcttgattctcgacagcgctttcttggcaacgagcgttgcgcccttcatgcaagccgatagggcagcgaatggcaaaaaggcatcgaattcggaatcgcccgcgcggatcgcaagggcaaaagaaagcccccctgtgcataacgcctgttcgtgagcgtgctcttccgagcggctttgcgtcggacacggtcaaggcgcgagatttcttccgaattcgatgccttcttgccatttagagatgctgcgagttgcgcggaagcgccacgatgtttcacgtgaaacatttgtacgtcttcgcggggatgcaggagaagggcgccagctgcatcccgcaccgaatgcgcccgggcgggccgtgcctttcgcgccttcatcccacgcgcttctcatgcccgtatgcttcgctttcggaggcgtactatatggtttcaagaactttgcaacattttccatggcgtcggcatgtttggggtaaggaggcgattggaaaccatggctgatttgcgctcggacgaattcatgaaccatgccctgcgcgattgggaggacatggtgtatcgtctcgcgctcagccagacgcgcgagcccgccgacgcaagcgatgtgtgccaggaaacgtttatcagcctgctgaaggacgcaactgtgttccaagacgacgaacacctcaaggcatggctcatccgcgtgaccatcaaccggtgcaaccagcttcgccgtaccgcgtcgcgccatcggacccaacctcttcccgatgatgaaacgctgcttcccaaaacgcccccggcatcggccgcgctgatggcgaacgaggtgtggagggttctcgacacccttccgcccaagtatcgcgtggtggtgcatctgcactatgtggaagggtattcgaccgaggagatcgccgagatcgcgaagtgtcggccctcgacggtgcgaagccgcttgcgtcgtgcccgcgcccagctcaagacgttgatagaacaggaggaatctcatgaagccgtcgccgatggacgagtatcgtgctttgatggaggaaatcgagagcccgagtacggtgcatgagagcatcctctccgagatcgaacgcgcgcgccgcgaggagcgtcggaagggtcgcgcaccgcatgcgcgccgagcgggcgcgcccggagatgcggcggcgagtgcgcgcgacggcgcgacggcggcggtcgtccggcggcttcggtggaggccggtcgccgcgggggcgtgcgcgcttgcggtcgtggcggcgctcgtgccgtttggcggccagctcttcgacatgctgggcgatatgggtggccatggcggcgccgttgcgggtcaggcgttctccgtgcgggcgtacgcgtcggacacgcgcacgctggttcctcctaccgataacgggatgatcgtgttcgaccgctccggcagcctgaccacgccaacgaaggattggtacttgcaatacgggaagtacaccggctgcatgttcaccgtggagggcgagggcatcgtacgcatccaggccaccacctcggcggggatgttctaccgcaacagctacgagaccatcaacgggcgagacgatcctgagcgcgtggccgaggtcactgcatggaaaccggagaaggcgggcttgggcgatcattacggaaagtacgagagcgtgcaagtggtcgacggatttggcctgcccgatcccgatcgtgacatgacggtgcgcctcacgaaaatgctcggttccactatcgacctgcctatcagcgcggacgatgacggcgacgcgaagagcttcggcctgtggaccaacgaggattacggcgacgcggtcgaaaccgcggaagacccacttgcggcgaccgatgcggtgttcgacacgttcgagggccaaaccataacggtgacggcctacttcgaggacggcagctgcgccacgcaaaccatcgagctgcacacggcagacttcaaggcgacgatgaacgatccgatggcgttctacggctacggttccatcgaggtgtatcccgagatcgtcgaccgctcgatgctgccgaacgtgttgggggacggggtggatgagggcgctcccttctgtctgcactcgttgtacggcgtcatcgtcgacgagaacgacgggccgcatccgtactcgctcgacaacgcgaacgagtggctcgatgcggcggtgccctacacgttcgagcggcgcgagacgttcaccagcatgggagatgcggtgttggctgaccagtcgataagcgatcccgacggacgggtgacggtttcggtgccggcggatccgctgtcagaagagcgctacggcgagatgtgcgacatcgagctgtcgaaccttcgcatcgagcggagcgaccggctgccgttcgggctggcggtcgaagacacctccgactacgcgggctttctgggagacttcgcctatatgaacaaggtgtcggacgagacgctgggctaccaaatcgcagacgacggcacgttgacgccggggttctcgtaccgcacggtcacgttcgaggcgacgaacccgtccgacgaggaggttcccgtcgatgcgagaacattgggcacgttcgccgttcgcgacgccgacggccgctgctctgcgttggcgacgcgcgccctatggatgaccggcttcgaagccggggtcgattcgaattggggagcggcactggcacctcacgaaacgcgggatctttcggttgtgtacgtcgtgctcgacgagttcgacgaacaggccgatccgctgttcgtcttcgccccgtatgcgaacgacgatgccgacagggttgccttccgcatcaagtcgctgctgtagtaaccgggcggtttggcggtgcgtccttcgcgcccctcgcggatgcgaccgcgcgaggggcgcgcttgtgcgctatcatggatgctcgaacgaaagaacccggatgtttcacgtgaaacatccgtacgcgatggggcgggcgaggaccatgacgaagaaactgctgatggggaacgaggcgttcgcgcatgcggcgttggaggccggggtgcgcgtggtggcgggctacccgggcacgccgtcgtccgagctgatcgagacggtggcgaagctgcatgccgacggcgccgcgcgcggcatccacgtggagtggtcgacgaatgagaagtcggccttggagctgctggccggcgcgtcgtacacgggcgcgcgctgcctgttcacctgcaagcaggtggggctcaacgtcgccagcgacgcgctgatgagcttgaactacgtgggcgtgaagggcggcatggtgctgttcgtggccgacgatcccggtcccatctcgtcgcagaccgagcaggacacgcgtcgcttcgccagcttcgcgaaactgcccgtgctcgatcccgccacgcccgaccagggcttcgccatgatgcaggccgcattcgacctgtccgagcgctaccatacgcccgtcatcgtgcgtcccaccacgcgcatcaaccacgcctcgacgttcttcgacgtcgcggacgccaccgacgcgcgcccggtgcccgacgagggcttcgagcgcaacccgaagtgggtcatcttcccgcgccgcgcctaccaggcgcacggcgagatcaacgagcgtttggcggccatcgcgcacgatttcgccgtcgatcccgcgctggccgcgttcaacccgatggtcgagggcggcgcgcagtcgaccgaggatgcacgaacgaatgtttcacgtgaaacattcgacgacgggagtatgccgaagacggcgacgagtgcgggcgccaaggcggtggggatcggcgcgggcgcgtcggagtctgcagctgccgcagtcgcgccgcgcctcggcatcgtggcgggcggcgtgtcggccgcctatgcgcgcgaggcgctgcgcatggtggaagcgcgcgcggcggcagcgggcgtggaaatgcccgcgtaccggttctggcaggtgggaacgccctacccgttcccggaggagctggccgcgacgttcgcggaaggcctcgacgaagtgctcgttctggaagagctcgaccatgtgctggaggatgcgctgctcgtgcatgctggtcgcacgcatgcgtcctacgaagtgcgcggccgcctgactggcgacgcgcgcgaccgtggcgagaacgacgtggacgattgcgccgcccgcatcgcgctcttcctcggtatcccgcaggtgctcgcccccgcgatgcccgcccctgcgtcgccgaccgccgcatcggccgcttccgcgtccgcgacgtcctctattccggttgccgaaactggaacgaatgtttcacgtgaaacattcgcctacgacgcgcctgccgacgcgccgctgcccgtgcgcccgcccgtgctgtgcgcgggctgcccccatcgcggcagcttctacgcggtgaagcgcgcgctggggaagacgtccgccgtgctgtgcggcgacatcggctgctacacgctgggcaacgcgatgccgctggacgccgtggacacctgcctgtgcatgggcgcgggcatcacgatggcgcagggcttcgccgtggccgagccgcacaagaagacgctggcgttcgtgggcgactccacgttcttcgccagcgggctgcctggcctggtgaacgccgtgtacaacggccacgacatcaccgtgtgcgtgctggacaacgccaccacggccatgaccggctcgcagccgcatcccggcaccggcgtcacgctcatggggccgaagcgccaacccatctccatcccgcgcgtgttggaggccgtcggcttcgactgcatcgtgcatgcgaacccgctcgacctcgatgcttcggtggcggccgtgcgcgaggcgctcgaccatgaaggccccagcgccgtcctgttcgagtcgccgtgcatccagctggtgaagccggacgcgcccgccgtcgtggatgccgaaacgtgcacgggctgcaagaagtgcatcaccgagatcggctgtcccggcatcggcttcgacgccgacgcgcgcggcccgcgcagcaagcagcgtggccaggcgttcgtcgaccccggcctctgcaacggctgcggcctgtgcgtccaagtgtgccccttcgacgcgctgtcgatgacggaaccccaaacagatgtttcacgtgaaacatcttcggacgcttctgggtcggaaggaggctgccatgcgtaacgtgttgctttcgggcgtgggcgggcagggcaccgtgctggcggcgaaggtgctggcccaggccgcgcaggataaaggctggcaagtgcgcacggccgagactatcggcatggcgcagcgcggcggcaacgtggtgtcgcacgtgcgcatgggcgacgcgggcgaggaggtgttcgccccgctgctggccgagggcacggccgacctcgtcatcgcgttcgagccggccgaggccgcccgcgtgctgccgttcctcgcgcccgacgggctgctggtcacggccactacagccatccagccggtcacggcggcgctgtccgacaagccctatcgcgccgacaacgtgctggcgaacatcgagcgatcgctggcgggcatcggcgcgcgcttcgtcgcggtggacgacgttgcgcttaccgacgcggtgggcagccgcaaggtgttgaactcggtgctgctggccagcgctctcaaggagggtcgcatcgcgcttgacctcgacgacttgcgccgcgccctcgaggagtgcgtgaagccgcgcttcgtcgccctcaacctggccgccgtcgacgcggtggctgcgcgataatcttcgcgccccgcgccccgcgccccgcgtcccgtgtgcggttagttggggaaggctccttgcgcgttcggggtcgccatcgtctttaagcaccgccccctgatgtatactgcggtcattcaaattttgtttgaatagtcggcggaaggcgagggcgttatggggcgggcgatggatcaggtgttgctgcaggaagcggtcgatttggcgcgcaagctttggcacgcgtacatcatcgagccttcggacgaaagcgttcaattcatcgtggacaccatggatccgcagaacctctcgctcatcggcacaggaaagcacgagctctatgtcaacctcgaggcgttcttcgcgggactcgagcgcgatcaggaagaagctcaggacatcaccttcgagatcctcgacgagtattacgagccgcgcgccattggcgaggacacctgcatcgtgttcggcacgttgtgggcgcgtgagcgacccgaccgtccgaaaccgttgctcgtggaaatggacacgcgtttcacgctggtattccgtcgcgagggcgaccggtggctgctggtgcatctgcatcattccacgcccaacgtcgatcaacggcgcgaagagtactatccgaaaacggctaccgagcaggcgaacgccgctttggagtattccaaggctatggagcgccgcgccgagcttgattctatgaccgagctgttgaaccatgccgcgttcgagaaatatgtggcagcggcgcttgtcgaaggcggcgagggcagcgctttcttcatgatcgacctcgacaacttcaaaacagtgaacgacacgttgggtcatcctgaaggcgaccgggtcatccaagagttcgccgacgtgctgttgcgcgtcttcccgcgcgatgcgctggtcgggcgcatgggaggcgacgagttcgccgtgttctctacctgcccgctttcggtagaggaagcccaatgcaaagcgtgcgagcttatcgaggcatggggatcgcattctgcttcgcgtgccgtagagctgggatgttcggtgggcatcgtgcgcgttgtgcgaggcgagacgttcttcgacctctaccgcgccgccgattgcgctctgtacgccagcaaggacaacggaaaaggctgctacagctggtgatcgccgtcggcactgggtcgcatgatagccggtgccgaaccgccctgcgcgctggttcgtcttgtcgttctggccagaaatcgtaaggccgatgtcggagcatcatcgccccaaaaacacgcttcacgcgttgaggcgtgtttttggggcgatgatgcttcccggggaacttgcgggtttgcaatcgcacgcccttcgcctagaataaacgcatggaactcgcgaacgacaacgacatcctctccttcccagccgtggtttcggcgggtcgatggctttagcttcaagactcgcgcccgcgggcttgaagcatcctcatatccggtagaagaccatcgtcccagaaggggatcatcatgcagcttaccaacgaccagttcgccctcatcaagcagcagttcgccacgctgaaggagcgctcggcgttttacgccgccaagttcgagggcatcgacctctccgatgtgcaaacccaggaggacttcgagaagcttccgttctccgagaaggacgatctgcgcaacgcctatccgctgggcttgcaggccgtgcccgacgaggagatcgtgcgcatccacagctccagcggcaccacgggcacgccggtcatcatcccctacacgcagcaggacgtcaccgactgggccatccagttcgcacgctgctacgagacggcgggcatcacgaaccgcgaccgcatccacatcacccccggctacggtctgtggacggctggcatcggcttccagctgggcgccgagcgcctgggcgccatgaccatcccgatggggccgggcaacaccgagaagcagctgcgcatgatgcaggacctcaagtccaccgtgctgtgcgccaccagctcctacgcgctgctgctggccgaggagatcgccgagcgcggcatccgcgaccgcatctgcctgcgcaagggcgtcatcggttccgagcggtggggcgacaagatgcgccagcgcatcgcgggcgagctgggcgtggagatctacgacatctacggcctgaccgaggtgtacggccctggcatcggcatatcgtgcgacgagcatcacggcatgcacatttgggacgattacgtgtacgtggaagtggtcgatcccgacaccggcgcgcccgtgcccgacggcgaagtgggcgagctggtgctgaccacgctgcgcaagcagggcgccccgctcatccgctaccgcacgcacgacctcacgcgcatcatcccgggcgactgcacgtgcggcttcggccatcgccacccgcgcatcgacacgctgaccggccgcaccgacgacatgttcaaggtgaagggctgcaacatcttccccgcccaggtggaggaagtcatcgccgccaccgacggcacgtccagcgagtaccaggtgatgatcgagaacatcagcggcaaggacgtgctcaccgtgttgttcgaaaccccgctgcaagacgaggcgaagacgcgcgccgaggaggagctggccctcatcttcaaggcgaagtgcggctgcacccccgatgccaagggcgtccccatgggcgagctgccccgcagcgagaagaaaacgaagcgcatcttcgacagccggtactagtcgcaaagcggagctttctcgtacgtggagggaggcaccctgacgggctgcctccctctttttgcgcgcgaaccgccttctttggtgcaagctagatgatgcggaagcttcggatgccttccggatgtttcacgtgaaacatccgttcggcggcggagggggatttgcgaactttttgcatgatggaggcgctccactatggtagagtatgcgcatgcattccgcgaagggacataccgccgtcgaacagcgctggcagcttcagctcgccgtcgcggctgtgtgccgctccctcgctccgcgtcccgcggactcgcttgtaacggtattcgccgcgcagccggcttcgccccacgcgtcccacgccgccgtgacgaccagcgcaatcgacgcggtcagcgctgtcgcccatcgtgcggccgacgcctctgacgcgcccctggccggtcgaaccgcctaccgtgccgtttcctattattcctatcgatacctctagcacatgggtttgcccgtggtgcttcgtcggcgtcgtgccgacgggtgttgcgttccggcaaagtcatgtgcgccaccgcgcgggcccttcccgacgcgatgttccacgtgaaacaattcatcgcattgcagtgcgacaaaggaacaaatgtttcacgtgaaacatccggtcgcggaacacgaagcaaaacggggctcgctttcttggggaagagcgcccgccgacgggcggcgcgcatgaatcgataggaagactcatgatcgaaaagatatgcatggtgcttattttcgtcggcgtggcggtgggcgtcggcatctactgccgacgacacaccggaagcgtcgacgggttcatcctgggcggccgcaacgtggggccgtggttgagcgcgttcgcgttcggcaccagctacttctccgccgtcatcttcgtgggctacgccggtcagttcggttggaaatacggcgtggccgccacgtggatcggcatcggcaacgccatcctgggaagcttgctggcctggtgggtactgggcccgcgcacgcgcgagatgacgcaccgcctgggcgcgtccacgatgcccgagttcttcggcgcgcggttccagtcgaagggtttgcgcatcgcggccgcggccatcatcttcgtgttcctcatcccgtacacggccagcgtgtacaacggcctgtcgcgcctgttcggcatggcgttcggcctgccctacgaggtgtgcgtcatcggtatggcggttatcacctgcgtgtacgtggtgctgggcggctacatggccacggtgatgaacgacttcatccagggcatcgtcatgctgctgggcatcgttgccgtcatcgtggcggtgctggtgaacaacgggggcttcaccgaggccctcaccacgctgtcgctcattcccgccgagggcagcgagatggccgggccgttcgtcagcttcttcgggccgaacctgcccgatctcatcggggtcatcgtgctgaccagcttgggcacgtggggtctgcctcagatggtgcagaagttctacgccatcaaaagcggtccagccatcaagcagggcgccatcatctccaccgtgttcgccatggtggtggccggcggcagctacttcctgggagggttcggccgcctgtacggcgatcaggtggagatgaccgccgcaggcacgccggtgtacgactctatcatgcccaccatgctgtccacgctgcccgacctgctcatcggcatcgtgatcgtgctggtgctgagcgcgtccatgtccacgctgtcatcgctggtgctgacgtcgtcgtccacgctgacgctcgatctgctgaaagacaacgtggtgaagaacatgagcgagaagaagcagttgggctacatgcgcgtgctgatcgtggtgttcatcgtgatctcggcggtgatcgcgctggtgcagtacaactcgtccatcacgttcatcgcgcagctgatgagcatctcgtggggcgcgctggccggctcgttcttggggccgttcttctgggggctgtactccaagcgcgtctcgcgtccggctgtgtgggccagcttcatcgtgggcgtgggtctgaccacgggcaacatgatcgccgggttcgtgggcgcggcgttcatcgcgtcgcccatcaactgcggcgccatcgcgatggtgctgtcgctgatcatcgtgccggtggtcagcttgttcacgaagcgcgttgagttcgaggtcgacccgccgcacgtcgagggagccatcgaccgcgaatacgagcaggagctggaagcggagtagttctgagccgaagcttcgaaacctctgtcgtctcaaagtctgcgggacggcagagggcgcttcgctccaagaacacgcttcagcgaacgaggcgtgttcttggagcgaagcttgcatctcggaagccgtttgccgcctgtgtctcgcatgaagcaccggcttgcttcgcgagcgtatcgcgcgaagcgctggtcacgaccgcctgtttggcgcattgcgcccgaagaggctccttatcaagggtcgcgctgttccgtctgacggtcttccgtgcagcccgtcgcgtcccggatggcgaaaacccatcgaattcggaagctatcgcgcgcgtcgcgcttgttcggcgcgaggtttcgcgtaaggtatcctctgcgaccaggtattatgcgggaggggttttcgccgcgcggctacgccgcgggcgaaatttccgaattcgatgggttttcgccatccgggggagccttcgactgcgcggataactcggtgcgcaacgctgccgagggcgatgcgtcgaaccggccggttcgcccgggtgtttcacgtgaaacacccgttcgtctttggtggtggcaccgcgcgccgtctacggctcgcatcagcgcgccgcgcgatggcttgtgtgctgttgggggttagggaggattcctattcgactcgcgactcggaacttccaacccctgagtactctgtgctcgttccgtccctgcgttctcgcgccccgcgggagcgaagggggcggcggctcgcgttccgcggtatactgtcagccagtatcggctttcgtgaaagcgcgcgcatgatcttccagcttgctctcatatactttcccgcgttggtgttcgggtttctgttcatcaaaaactaccgcaaggagccgcggcagtttcgcaacgcgctgtacttcctgctgctgtgcctgttcgcgctgtacgggctgtccatccagttcgagctgccgtggctggtgctcatcggcttggcggccattccgttcggcacggtagcgctggtggtgttcctgctggcgaacacgttcgtggtggtgaagcgcgaaggcctgtcgctgtcgcatctgctgccgggcctgctggcgctttgcatcgtgatggcgtgcgtgggaggtccggtgctgctgttcgtccaggcgccgcccatcgtgctggcgttggcgctgctggtgctgatggagggctcgtacgtggcgttcacgttcgcggccctgctgctgtattcgtggttgtaccgccgtctgcccaagcgccgcgattacgattacatcgtcgtgcacggcgccggcctgtcgggcacgaagcccacgcccctgctggccgcgcgcctggacaaggccgtcgagctatgggaggccgaccaccgccgcgccgtcatcatcgcgtcgggcggccaaggagccgacgaggaggtgtcggaagccgaggccatgcgcacgtacctcgtcgaggagcgcggcgtgcccgccgatgccgtcatcgaggaggaccgatccaccaccacgatggagaacctgcgcaactccaaagccatcatggacgcgcggtcgggcgcgggcgcgtaccgcgccgcggtggtgaccagcgattaccacgtgttccgtacggccgagtacgcgcacaagatcgggctggccgccgacggcgtgggcagcaggaccgcgcgctacttctggcccaccgcgttcatccgcgaatacgtggccgtcagcaacgcccaccgctggccgttcgtggttatcttcgtgttctggctccctttcgccgccatcgcgctgttccagctgtagaacgctttgcgcccgcgcccgacgtcgcacggcctaacgcgtcgcgctcgcacttgcgtccgacgtcgcgcggctcgcgttcgcgcttgcgcccgcgtccgacacgcgtggctcctcgcgttcgcgcttgctcccgcgcccggcgtcgcacggcccctcgcgttcgtgctcgcgtgcttcgtcgatcgaaaacatcggcgttttcgccccctcgggcgcgcttgtccttgtatacttaggaaactggtgccgagcggcggcgattcggcctgcgtcctcaagcatcgcgtcgggagaagcgcggcgagggtgaaggcggaaccacgtgcatgccgttcggcgaatagcacgacgaaggggatcatatggaaggattcgacctcatcagcacgggggtatggtcaatcataccgccgattcttgcgctgggtttggcgctgatcacgaaggaggtgtattcctcgctggccatcggcgtgttcgtgggcatggtgatctaccagttctcgctcaacggcgtgggcgtcgagccgctggtggactcgttcaccatggtgccgcagatgatggccgagcagatagccggcaacggggcgctgctgctgttccttgcgttattgggcgcgctcgtggtggtcatcgcggccgccggcggatcgcgcgcgtacgccgagtgggtgtctacgcacatcaagaacgcgaagatggcgcagattctcactgcggtgctgggcatcatcatcttcgtggacgactacttcaactgcctcacggtgggcgcggtcatgcgccccgtcaccgatcgatttaacatcagccacgagaagctggcatggatcatcgactccaccgcggcgcctatctgcatcatcgcgccggtgtcttcgtgggccgtggccgtaggcggctacctgggcgaaggcggtttcaccacgttcgtccagtccatcccgtacaacttctatgcgctgctcaccatcgtgttcgtcttcttcatgtgcgctaccaagaaggacttcggccccatgcgcgttgccgaggccgaggtgcagaagccggccgaccagcagcatcgcattccgtcgaaggacagcgctctcgagtcgatgtcgacggtgggcatttccgatccgaacgcggccgacgcgctgccggcgaagctggataccatcgtagccgaggaagacgagctggacgaggctgcgaaggtggccgtcgaagagttcaagggcatggccatctcggacaagggacgcgtgttcgacctgatcattcccatcatcgtgctcatcatcttctcgattctgggcatgctgtacgcgggcggcttcttccagggcgtcgacttcgccacggctgtgggcgagaatccggtgttcggcctgtgcatcggcgtgtgcgtggcgctggtggtgacggcggccatgttcctgccgcgcaagctgatgacgctgtcggggtacatggacggcgtggccgagggcgtgcgctccatggtgggcgccatcatgatcctcgtgctggcatggagcctaggcggcacgtgccgctacctgctgggtacgggcgagttcgtcagcggcttcctgaacagcatcggcgtggggctggctctgctgccggtggtcatcttcgtggtggcggcgttcatcggcttcgccatgggcacgtcatggggaaccatcgcgctgatcctgcccatcgtgatcggcgtgtttccggcgcaagatccgctgttcctcgtggccatcggcgccacgctgggcggtgcggtgtacggcgaccatgtgtcgcctatttcggataccactatcctgtcgtcggcgggcgcgcaatgcaaccacctgcgccacgtggccacgcagctgccgtacgcttcggtggtggcggccgtgtgtctggtgggctacatcatcgccggcttcacgggcaacccgtggatcgcgctcgtcgtgggcgccgtgctgatgatcgcggctgtgctggtgctgaaccgctcgaagtacggggcggtgaaggcgtaagcgcgaacgcgggcaagcgagcaagcgaagcgcagcgagcgcccgggacggccactccgccccgggcgctttttttgagcccgaagccaccccgctgcgcccggcgtcgcttgcgcccagcgtcgctccccgcccgccgcgcccgtgtcgccccgcgcgcaatggcgagcgccccgcgttgccgcgctccgcatcttccccgcccgccgcgcccgcgtcgtcccgcgcgcaatggctaacgccccgcgtcgccccgcccgccgtgcccgccgggcccgccagatgtacggatgtttcacgtgaaacatccgtaccgttcaacgcatattcccacttcaaacgcccatagctcgtttcgtgcgatcgaaagttacatcctttcgtgcgatggtgcgcttcttcctccgtcgtatagtgcgcagcgttcgaggcggctcggccgcctgtctacgagaggagagagcaatggggagcacgttcaccagaaggcagttcgtcatgggggctatggtgctgggcgggtcgctcgcgctgaccggatgcagcccgaagcccgagtccaagaaacaggacggcgcgtcgggcgcaaccgagcccgtgcaagccgacatcatcgtcatcggttcgggtctggccggctcggcctgttcgatctccgcggcgcagaacggcgcgagcgtgctgctggtcgacaaggcgccgtttctcacgtccaccttcctcacctcgaagggcaacgtgtccattgcccaggttccagagaataaggacgagtggcgcttcgaatccgagacgcccgacaccatggaccagttcgtcagccgctaccgcaacctcaccgagatcggcaaggtggacgcgccgtaccccgactatagccgcatgcagcgcatgatggaggaaagctgcgccaccatcgcgtgggtagagcagctgggcatcacgttcgagaagtcgtttaccaaggagatggtgggcaccgacacggtaaagcccgacgtcagcgccgaccctgcgacggaagcgggcgtccaggtggcgaacgcgttcgcggccgaattcgagcgcttgggcgtgcggacgatgctgtccgccgaggcgaaagagctgatcatggacggcgatgccgtggtgggcgtgaaggtcgaggggcctgacggcgtccaagagctgcgtgcgaaggccgtggtgctggccaccggcggtttcggcggcagcgcggagtactgcgaccagctggtgcccgccatcaacgagatgggcttccagtacctgggcaacgctatgaacacgggcgacggcatgaccatggcctccgccattggcgccgcgctgtacgaggatccgtgggtcatcccgaacgtcatcatgcccacgcgcacgctgacgaaggccgacgcgggcttcaagaagctgtgcgacaccggcatggaaggtgctgccacgtcgtcgaagatgctggtggactccacgggcgcgcgcttcgtgaacgaggcggctccggtgacggcgctggccacgtccatgaccgacaaccaggcggggccgtactacgtgctgttcgacagctcgaacgccgaggtggtcgcagtcatcgagaagggcctgtccacgggcgacgtgctgaagggcgtttcgatcgaggagctggccgacgcggccggcgcgccccagcttgcggcgacgttcgaggcgtaccagcaggcggcagctgcgggtgcggacgaggcgttcggcaagaaggccgacatgctggcggcgtacggcgacggcccgttctacctggtgaagttcgtgccgtcctatgtggccacgatgggcggcgtgaaaaccgacgcatcgtgccaagcgctcggcgaaaacggcagcgtcatccccggcctgttcgcggttggcgaggccacgcaccgcttcatgtacaaccgcagctttgtgcgccactgctccaactccagcgccctcaccatgggtcgtctgacgggagcggcgctggccacggcgtaacgacccgatcttccctcgcgcgcaggccggaccccctccccggcctgcgcttgcgtttgcccgccgtcaagcatgcgtcgaaaatccccgctctatcgtcccataggacgatagagatccgcacgcgcttgtcgcggcaccgagcgcgacgaatgtttcacgtgaaacattcgttcgattacggattcgttgcgggctttgccctcgcgacggcgtcaccccctccccgatggggttgccaacgaaaagggctaactcttcttggcggcgctcgtctcctctatgaggtcgagcaattcctggcgcgagtgcacgtccatcttcgcgtaagcgtggcgcaggtgggttttcaccgtgtgctccgacagcgtgaaacgctcggcgatggcccgggcgctgcgtcccgccgcaaactcctcgatcacttcgaactcgcggttcgtcagctcgtaggtgcccttcatctgcacgagcgcatcgcctgccgacaggtgcgccagcgggacggccgccgcttcctcgggggcgctcgcatcgccgaccgcatcccgcttcgacgcatagcgaaggtagctgcagaacatgagcgccagcgtggccaccagcagccacaccgagccgacgagcgcgagctgcggatcgacgccggtttgctccaacagcgtctgcgccgcgaagcgccccagcgccaccgacagcctcgcgacgcccaaggccaagcccagcaggaagaacgccggcagcttccgctcgttcgcctcgctgatgaacatgagccacagcagcacgtagaacgagatgaggaacgcggtcatcagcgatccggccacgtgcccgtcggcgacgttgaggctgcggtacagcaagatggtgaccaggcacaacgcggtgatgggcgtgatgtagtcgatgttcgccttgcgcggcttcgccaccagcagcacggccagcatggccacggccgcgatgatcccgaacaggccggtgaggtcggtctgcgcgtactgcaggttgttgtggatgtcgagctctatcacgaacccgcagatcagcgagaacgcgaacgtccctgcgaccgcgcgcttcgtgcgcgaaagcgcctcggccatggaggttgcgggtgcgacggattccttcatctgctgggcgacgaacgcgttgttgcgcaggcaccacagcagcgcggcggtggacaggacgaacgacgccagcagcatgatgctgcgcccgcctgggaacagcgaactggtcagcggcggaagcagcgtatcaatgaggtacgcgacggcgatcaggggaagcgagagccgcggccggtagctggtgaacacttccatccagcagaggatggacagcgaccagcccatgcccgccgtcacctgcatggcgataagcgcgatatcgtttgtgttgcccgacgcaacgagcacggcgtagatcgagctgacgacgacggccgcgacgaacagcggcttcgcccggtcgatgcgcccgaggtaggagaggacggcgacgacgaggaacgtgagcccgtcggccgcgaggcctaccagggcgtaggggctggggctgtagggccccgtgttgaggtcgagcagccgcgcgccctgcagcaggccgaacccgagcgtggccaccgccgcgagggcgaggattcgcgttttgtcagatgcgtgcgcgttcatcgtttcccctttgcttgcgaaacagtcgcgccccactataacgcacccgcgcccgccgcgctctgcgaagccgagcagaaccgcacagatgtttcacgtgaaacactcgctgctcgcaccgccgcgatcatgcgaccctgtcggacattgaagcgaacgaatgtttcacgtgaaacattcgggctgcggaagaagcgcgccaggcgttttcgtgcccactgcaaattgcgcttccttgatcgagcgcttccgcgtcgatctgcgcgctgcggcgcctgcgcccagtttcgccgtgcgaggttagggcgatgggcgcgctacccgctcactacgcggggcagggcgatgtcgtggggctcgcaggggacggttttcacgcgctgctcgtcgaaggcgatgccgaccacggcggcatcggcgcgcaagcgggggagcagctggtcgtagttgccgccgccgtagcccaggcgccgtccggcatcgtcgaaggcgaccagcggcaccaccacggcgtcgagctcctcgggatcgacggcctggaacccgtcacgctccagcgcttcgcaggcaaggcagcgcaggggcgcgccaaggaaccccgctgcggccgcgtccagctgctcgcgcgccacgcggtagaatcgcatcagaggcgacccgctcgtgtcgcccgtttcgcccgctgcccgccgttcgctcgcctcgcccgctgcccgcgacccgctcggcattcgcggcgcgtctcccgcccgcggctcgctcggcaccggcgacccgcctgcttcgtccgcgcccgcgcgacccgccgcccgcgacccgcccgccgcaggctcctcgcgcaccatgcaggggaagcacacgtcccagccgcgcgcgtacgccgcctcgacgaacggccgcgtgtccacctcgctgcgcatcgacgcgaacacggccacagtgggaaccgcgctcccgcccgtcgcatccgcgcgcgacgtcccctcggccgaaacctgcgccgtccccgcaccttccgcgcccgccagcgcttccgccagcacctgctccaaccgcgcgcatatcgccgcgctcttgcgcgcacgcacctcttccggaagcgcatcgcgacgagccagcacgcgcgagcgcagttgttttttcgtctccataggccgcagtatagcatcgacgtaacggcgccgttgcacgataatggcggaggtgtggggagttagcgcaaacgtaaccgtttccattcgatttgacctgcaaacccatcattgaccttgctataatcgttttgcattgggtacactcggaccaccttagatagctctccctcgcagtcgcaaggggtgcaccacctcaaacgacgctgcgtatgcgtcgtttgttgttttctaaggagaaattgactaccaagcatatataagtaggtcgctcaccaggcatcatgcatgccgggcgacatagagtaaggagacagcagtgcaactcaaggcatccaccgattacggtatgcgcgccatcttgtacttggctgcgcaaggtaccacctgctcctcgaaagatatcgcggaggacatgtccattccgcgcgactacctcatccagctggcgcagctgttgcgcaacgcaggcatcatcgaggcccgtccgggcaagcacggcggctatcgcctggcgaaggatccggccgacacgaacgtgctggagatcatggaagcgctcgacgacgatgcgaagcagtccacgcgcgcgaagcgcgatgcgcgcaagggcggcgcgatggtgcaggagatcaagcaggtctacgatctcatcgaagagagcatggacgcctatctgtccagcttgacggtgcagatgctgctcgactgcgcccgcaacggcgacaacagccgcacgtttttggccgaacgactgcaggaagaaagccgccgcctgctcgacgccgtcaagtagcgtcgacgcagcccggcggctgcgctcttttcgccgcgccgccgccgaggcgtctagatgcccagcacctgcatcaccagcagcacggcggtgagcacggtaacgatgcccacggtgacccagatcagcacgcgcgacacgatgcgcgaacggtacgcgcccataacccgcttgtccgcggcgatgatggccatgaacaccagcagcaccggcagcaccaggccgttcacgaactgggcggtcagcatcacgcccatgaggtcgatgttcggcaccagcaccaccacggccgagaacgcgatcacgaacgtgaagatgctcttgaacagcggcgcctctttccacttgaacgaaacgcccgcctcccagccgaaggcctcgcagatgacgaacgccgtggtcaacggcagaacgcaggccgccaagaacgacgcggcgatcagtccgatggcgaacagcgcttcggcgtagtgcccggcgaacggcgccagcgcgcgcgccgcgtcggcggccgattcaatctcgattccctgcgggaacagcaccgatcccgtggtcacgatgatgaaccaggccacgaggcacgcggcgatggtgccggcgatcacgtccaccttctgcgagaacaggtccttcaccgacacgcccttttccaccacgttgctctggttgaagaacatcatccacggcgcgatggtggtgccgatcatcgcgatgaccagcgacacgaagctctggtcgttcacgatgcgcggcacgacggtgctggtcagagcctcttcccagttcggttcggccatgaacgccgccacgatgtaggtgacgaacaccagcgacaggatgaggaacaccttctccacgcgcttgtagctgccgcccaccaccagaagccacacggccacggcggccacgggcacggccaggtacttcgacacgccgaacatctccatgccgctggcgatgccggcgaactcggagaacgtggtggccacgttgccgatgagcagcgccagcatggccagcgcggtcaggcggatgccgaagcgctcgcggatgagtgcggcgaagcccttgccggtgacggcgcccatgcgcgcggccgtcatctccaccacgatcagcagcacgcacatgatggggatgacccacagcgtggcgaagccgaacttcgcgcccacggtggagtaggtggagatgccgcccgcgtcgttgccggccatggccgtgacgatgccagggcccagcgctgctagcagcagccagatctttttgggctgcttcttctcgggagcttcgacgagctcggtcgactcgatcgcgtcgacggcgacgtcgcgcacttcgagcttctcgttcttcttcatcatcatggcgctacctcccggcgtagccgatgatctgcagcagcaccagcgtgtacagcgccaggaacaggatggacgccacgaggccgcccagcaccttgagcagggtggccttcgtcttgtcgccgctcacgtcctcctcgatggcgtcccacgcgtcgtcgaccgtgacgatgcccagcagcacgccgtgctcgtccaccacgggcatggcgggcagctcgtacttgaagatgtcggccgccacgtcctcctcggtctcgtccggcgtcgcggagatcacgtcgtcgaacatcacgtcgcgcacgggccgcgcgtcgtcggtgagcacgagggtgcgcaagctcagcacgcccacgaactcgtcgtagtcgttcagcacgtacacgtaatgcacggtggggtggtcgtcgtccagctcgcgcagcacctcgatggtctcgcccacggtgttgtcggccttcacggccacgaactgcgtggtcatcatgccgccggccgtgccgtccttgtagcccagcaggcggcggatctcggtggcgtcctccacgcccatgaggcgcagcaacgtctcggccttctcgtacgacaggtcgcgcacgatgtcggccgcgtcgtccgggtccatgtcgcccaaaaggccggcggcgcgagcgtcgtcgaggtcttcgatgaagtcggcctggtactcgtcgtccatctcggagatggcctcggtggcctgcgcgtcgtccagatgctggaacacgttggcgcgctgctgggggtccagctgctccaggatgtcggccacgtcggcggggtgcagctcgtccaggcgcttgtgcgtgacggacagctgcactttggacaggtcgcgatcgagcaggtccatgtagttccaggcgatgatctgctcgtcgatcttcttgccgaacaccttcgccacggccaccacggcgcgctccagccaggaggccagtccgcgcaggatgccgcgcacgcccacttcggcgcccagcaggcgcagctgcgagcccgaaacggacagcttgaggtcgttgacgcgcaccactttcaggccttgcgtatccacgatctgacggttcagcaggtcgcgcgccagcagaacttcgtcaggttgcagatagctgaagcggatgtcgtgcgcctcggcgttgagggtgatcccgtcctcgtcgaacgtgtcgacgtacttgcgccacgagatcatgaacggaaccttgccgggcccctggaaggccaggctggtgatgcgcgggaacacttcgccggtggagatggcgaggtcggagatggtgccgatcttctcgccctggatgtccacgacgggtttccccatcatttgagagaggtagagcatggtggtatcccttactgtcatgcccatggccgtacacctcatgataccgtgtgcaaagacgcgcgcgtcgcgcgcaatgcaaaatgtgtgtcaagccatgagccgccgcagtcgttccttcgactgccgacgtaagggaagacgaaggaagaactacttactgtgaggcttcgattttcgaaccttcaagtacgttcctttccctgaccaataaaaaatccgcacgtgctgctgccagtcgttgcggaattagaagctgaaatggtgcgccgtgagggattcgaacccccgacgtactgattcgtagtcagtccctctatccagctgaggtaacggcgcacgtcgaaacagcaaaagttattatgccggtattgccccatgctgtcaacgactttttcagactttttgggaatagtgcgcgaaataggtgtttgaactggcgaaacgagaaaaaagtcggacgaaggccgcctgttcgtcatgcactgcgccgagtacggggcgcttccggtgcgcgtcgatgtttcacgtgaaacattcgcccgcattgcggggcgattacaagcgggcatgcccggcctcttcgtgcgtgcgcgtggctaggatgaggcggaacgcgtcttgaatccaacgaagaaagcgaggctgttatgacgaagactgcgaaatggtcgatgatcggcgtgcttgccgctctggtgctggcgctgttcgccgttgccggctgctcaagcgacaacgcgggcaacaacgacaacggaggcgacaacgccaaccctgccaccgagaacaacgacaatggcggcgggaacaacggcgacaacgccgacaacaacggcaacgacaacaacaataacaacaacggcaaccagatgggcgacggcagcagcatcggcgaaggcaccgtcctcaaggttccgaacggctgggttgcctattcccagagcgacatgctcgtgctgctggactcgaatgccgacgtccagtaccagtggacggccgaggttaacggcaacaccgtgctgaaggacaccgacgccgacctgccgtcctccggcttcaacgatcagaactcccaggacgtcgtgggcgcggccggcatgcacgcgttcgggttcctggccgacgaccagaacaacggcgagtccaccatcacgatgaaactggcgaacacgtcgaatgccaacgatgtgaagaccaccatcgtagtgaaggccacggtgcagaacggcacgttcacggacgtgagcgtgcaggagtagcgcgcctcccgctatactgcgggaaagcgaaaccgctcggaaggagtgcgcgatgaaagctcgtctgaaactcgcgatagcaggagcatgcatggcggctttcgtcgcgttcgccgtcggatgctccgctgcgccgggatccgaggtccagatcgccgaagggtcggcggagttcagccagagcaaccttgtggtcaagctggacgcgaaccccacgacggggtacgagtggaccttccagatcgacggctcggccgtgcagcccgacggcgacgagttcgtccccgcgagcgacggcgcccagcccaagacgggcgaaggcggcgtgcacacgttcaacttcaaagccgacggctcgggcgaggctacgcttacgttcacgtatgcgcggtcgtgggaggcgtcggacagcgacaagagcgtcgtgctgcatgcgacggttgaaaacggcgcgttcacgcaggttgaagagcaggcgtaaacatcaaagggcggggacggccgagcgccgttcccgccctttctcgtgcggactgctctaaatgctgaggtcgcgccgatcgaaggccgcaaccgccacggcgaacagcgccaccgcgcccacggccagcgcgatcgcgccgccgacggctgacgcgtcgcccgcggccaggccgtagtagtcgaacagcgtcagcgggttgacgttcttcaggaactcgaacttgtcgcccacctgcgatgccatctgcatgaggaagaacaggatgttcaggccgcctcccacccacagggcggccgtcgcgttcgagaacagacatgcggacaggaagcacaacccggccatcgccagccacagggccagcaatcccgcattcacctgcatcagcgcctgcatgtccagctcgccggggaacagcgcctcggcgaaacccacttcgagcgccgtgaccaccgccatgagcgccaccagaatggtcaccatcacgcccaccatggtcagcgcgatgcgcgtgcggctgttcggcgtagccagcagatacgccatggcgccgcgatcgaggtagcgcaccatcagcttgttcgccacgatcaagatgagcacgaggatgaagatggtcagcaagaacccgtacaggtagttcagcatgaagtcgatgagggtggtggcctgcaccgacatgccgaacgccgcaaacatctcgggcatgctctgcatcatggcatccaggctttctcccagctccggatcgtacatgctgacgatcacgccgatgtacatggccagtaccgccgcgatgatgaggctgacgaacaggttcgcgcgcagctctttggcgaacaacgtcctattcatgagagcctcctttctccacctggttcgtcgtgccgtacaggtgcatgaacagctcttccagcgtttgctcgcgtgcggagaggtccacgatgtcgtaggcggccaagtcctttacgaacgcgtcggggttgccggccacagctgcctccacgctggccgcgccctgtttccgcgcgtcgggatgcgcctgcgcgtagcggtcgcgcgcggcctcgtcggcgaacgtcaccgcgaacacgcgcttgcggctcttccgcacgtcgtccatgcgctcgacggcggccagcctgcccgcgcggatgaatgcgacgcggtcgcacgtgcgctccacttcgtcgaacaggtgcgacgaaagcaggatggtggtgccgcggcgcttctcctcaagcacgaggtcgatgaagcggctttgcatgagggggtcgaggccgctggtgggttcgtccaataaaatgatgtcgggcgaggtcatgaacgcgcacaccagacccaccttctgcttcgtgcccttcgacatcttgcggatgcgccgcgctgggtccagctcgaaatactcgaccagctggttcatgcgcgtgcggtcgcgcagcttcttcatgcgcgccatgaattccaggaaggccgcgccggtcatctcgtccatgcaggcgatctcgcccggcaggtagcccaggcgctcttggatgcggctgcgctggctgaagcagttcaggccgtcgatgctcacggtgccctcatcaggccgaatgaagcccatgaggttgcgcatggtcacggttttcccggcgccgttcggccccaggaagccgaacacctcaccgcgttccacggagaacgacacgtcgaacacgccgcggccgttgccgtagtcttttttgagccccttgagttcgatcacggggtcgctcatcggtattcctccttgtacgaataggctttcagcatgtcgcaccagcggtacatctcgtccatcatggcgtctaaatcgatgcgttgatgcagcgcttgctgttggtgcagatagccgtcggccagccaaatcagcatgttgagcacgtacttcggatcgatgtcgtcgcggaaccggtcaaaccgcacgttcttgaagtacgtcgtgaacataaagtcgagttgtcgctgcgtccagctgtccatcgtatcctttatgtccttgtgctccgggtagaaggcccggatggagaacttcagcaggtaagggaacttgctcagcaccttggacttggtttccgccgcgtagacgagcagctcgaagaagtcgtcgatctcccagtacccttcgtccagcaccagatcggacaccttttccatcaggtgctccatgaggtacaggtacagctccttcttgttcttgaagtagaagaacagaaggcccttcgagatgcctgccctgcgcgcgatcgtctcggtcgaggcgttcttgtaatcgttcttgccgaacgtttccacggcggcgctgacgatggcctcgcgccgctcttcgggaaggctctcgaatttcgagcgtcggtcgtccactgccgcctcctttcctgccgccgttgaccggccggtcaacggatcgaagaccatgctaccccgttgactattttttagaagggggcgcgaggaagattttttgccaggtcgaccctcccccctttgttctgtccttgcaagtcggaatcgtctttttggcaaatagtgtgcgaattcggaagcctgcacgttcgcgatcgcccctgcgctttcggcaagcgccaaaggcgcagcaaaaaccccagctcgcgaaaactgccggctctttcccggttttttcttttccgaattcgaccaactattgccactgctgctgccatgaactgcccgatcatgatagaatcagcctcactacagagccagtgcaggcgctctccatcgttcgagtagcccattgctggaagcgatgccctcgtcttcccctaccacgtctgcaagatcctctccgcccagggcaaataagggggtcttgtgcagaagatcgcacgtgcctcgcaatcacgtatcgttttcggatacatcacggccttgcagatgctgcgcatggcccaaccctgcgagctagcttcggtgaggagcggaaaaccaagcatccccgagcgcgccccgcgcaccaaagagctcagctcggcgcttgagcgcatagaaggggatcatccgggtctgaggttcgaaaggcctagtcacgtgctggtgagcacgccgaacggtcgggcgggggagctttgcgttcctcatgtgtgcacgaggggcttctcgcgttcctcgttctttcgattgggcgatgacgtgttcttcagcaaacctgagcttgcattcattcaaatggcaacgcggatccgcaacgaggtttcgctgcttgagttggggtgggagttgtgcgggtcgtatcagacgaggcgtactggcgcttcggttggatacgatgtcgagccgctgacaagcgttcgggctttgcgcgactacgtagcgtgcaacagctcgctcggcggtgcgcttctggtcgggtgcggctgtgcagcgagccaccttgagctgagtgcgggggtacggcggtgcagcgaaccccggtgcttttggcgaaaagtggccgaattcggaaaccgcaaaacggattggtcgaaggctgcgaagcgcggcgttttcagtaccttgtcgaccaggcgttttgcgacagcgtcgtccctgtctttcaagacggttgccttcgcctcccttgagacttccgaattcgatggtattttgctatcgagggcccttccggcgtgcaaggaccggctcgggatagtggtgggaggggcggctccctcgactcgggacggctttctcgctgagggcggctatctggggcggcgcgctatcgcgcgtacacggtgcgcttgcgcgtaaccaggcggtcgacgaactcggtggcggggttgcgcaggatgtcgcacggctcggcgaactgcacggcgcggccggcctccatcaccagcaccttgtcgcccaggtcgagtgcctcgtcgatgtcgtgcgtcacgaacagcacggtgatgcccgtctgccgatggatgcgcttgatctcgtcctgcaggctgccgcgggtgatggcgtccacggcgctgaacggctcgtcggccagcaggatgtcggggctggccgccaacgcgcgggcgatgccgacgcgctgcgcctgtccgcccgacagctcggcgggatagcgatccatgatgtcgtgcggcagcccgatgatgtccatccatttcacgacggcctcctcggtgcgaccctcgtcgccgctgttcagcagcgagggcacgtacgcgatgttctgctccacggtgaggtggggaaacagcacgctgccttggatggcgtagccgatgtttcggcgcagctcgatggggttgacgccgctcgtgtccttcccgtgcaccagcacgcgtccatcgtcgggcatcgccagcgcgttcaccattttcaacagcgtggtcttgccgcagcccgagctgccgatgatggtgacgaacgcgccttcgtcgatgtcgaggttcgcgtcgtccacggcgacggcatcgccgaatcgcttgctgacgtgctcgaacgcaacggcgggcgtgccggtctgctgcatgccgtccatgctacatcagccccttctcggccaggaacgcgtcggccaccgctttcggctcctgcccttgcgtctccacttcgttgttcatgcgtgccatgttcgtatcggtgatggcgccttgcagcttcagcagctcgtcgcgcagctcgggatgcttttccagcgcgtcctggcgcacgacgttgccgcagaggtacgacggatagaagtgccggtcgtcctccagcaccacgaggcgttcgtcggccacctgcccgtcggtggtggacacgacgatggcgtccacctggccctcgaacagcgcctggtacttcaagctgatgtccatgtcccgcgtgttgccgaagttcatgccgtaggcttgctgcaagccggggtagccgtcctgccggtcgaagaagtcgggctcggcgcccagcgtcaagtcgcccgctgcgcccgccaggtcggaatatgtgcgcaggttgtagcgctcggcggcgtcgcggctcacggccaggccgaacgtgttgttgaagccgtacatgcccacccaggtaaggcctagctgcgactcgtactcctgctgcatcgtgtcgaacatcgactcgtcgtaggtgtcgtcgtgcttgagcacggcgttccatcccgttcccgtgtactcggggtagaggtcgaagtctcccttctccatgccgggctcgatgttcgacgtgccgccgcccacgccctgcgtcagctccaccttgaggtcggtgtcgtgctcgatcagcgtgttcagcatctcgccgaggatgtactgctcggtcatgggcttcgtggcgatgttcaccacgtcctctccaccgccgcggttcgcgaacgcgaacgccccgcccgctatcagcaccacggctgcgcccgcggcgacggccggggccagcttgcggcgtgaagcccgacgtgcgcccgagcgcttccaccgccgtgcgctcgaaggctccaggtgacgtcgcgtggactcctcggccaggcccagcagcaggtccaccacgatggccagcagcgcgatcagcacgctgcccgccagggtcatggccaggttgtacgtcgtgatgccgcggaagatggccacgcccaagccgcctgcgccgatgaacgtggcgatgccggccagcgcgatggtcatggtggccatgttgcggatgccgctcatgatgacgggcgcggccagcggcagttcgatacggtacagcagctggcggtcggtggagcccatgccgcgcgccgcctcgatgatggcagggtcgatggtggtgaggccggtgtaggtgttgcgcaccatcggcagcagcgcgtacacggtgagcgccacgatggcggtagggtcgccgatgcccgtgatggggatgaggaagccgaacagcgcaatggatgggatggtgtacacgaaattgaccagcgcaagcacgggcttcgcccctcgcctccatgtggcgatggcgattcccagcgacagtccgatgagcgccgccagtgcaatggatatgagcgagatgccgatatgctgcagaaggagctcgaaaaaccaatcgcgtttttcaacgagcaaggccagggtttcggtcagaatcaagaggaatcctcgctttcgcacgtggtgacggacgctacgtcgagggttgagatgcggactgcatggttaaatcctacagacttcgtcaacattgtaatcaagtgtcggtgcttgggcgcggcaaggcggtcgtgttacctaatcgccacgagacggtggattcccgggtactgcctgtggttttcgccgggtgactggcatgcattgattgcgcagcgggtcgctgcgctttatcataataaagagagacgtattttcccattcgccatatccaccagagaccgcgtgtttcaagggcggtcatcgcgtgcagcatggtatttcggaagaggggccgcgctcgcgcggcaggaaggatgcgccatggcaactgaaagccagatcgctctgtacgagaacttcaaggcgatcaacaccatcgaaaccgcgagctacgaccagttcgacgtgaagcgcggcctgcgcaacgccgacggcacgggcgtcatcgcaggtcttacgaacatcgccaacgttcacggctacgtggtctcagacggcgagaaggtagccgacgagggtatgctgcgctatcgcggctacgacgtgtacgacctgttggacaccagcgtggccgatcgccgcttcaacttcgaggaggtggcgtacctgctgctcatgggcgagctgcccacgcaggagcagctcgaccgcttcatcgccgcgctcgatgccgaacgcgaactgcccgacggcttcactgcctccatgatcatgcgcgacaccccgcccgacatcatgaacatgctgcagcgcaccatcctgctgctgtacgcctacgacgcggacgccgaggatcgctcggctcatcatgagatccacaccgccatctcgctgatctcgcgtctgccgcgcatcatggtgctgacctactacgcgaagcaggctcgatacaacaacggctccatgatcatgcatcgcttcattcccggtcagtccacggccgagaccatcctgtccatgctgcgtcccgatcgccagttcacggctgaggaagcgcgcatgctggacatcatgctgtgcctgcatgccgagcatggcggcggcaacaactccacgtttgccacgcgcgtgctgacctcgtccgacaccgatccgtactccacgtacgccggcgctatcggttcgctcaaggggtcgaagcatggtggcgcgaaccatcaggtgctagctatgcagcaggagatcaagcagaacgtggccgactggtccgacgagggccaggtggccgactacctggcgaagatcgtcaacaaggaggctttcgacaagacgggtctcgtgtacggcatggggcatgcggtgtacacgaagtccgacccacgcgccatcatctgcaagcagttcgccgagaagctggccgtgggcacggagttcgaggccgagtatcgtctgctggaaagcatcgagcgcctggcgcccgaggtgattctgcgtgaaaagggcaccagcaaggacatgtgtgcgaacatcgacatgtattcgggcttcgtatactcgatgatgggcattcccgaggatttgttcacgccgctgttcgcgtgcgcgcgcatgtccggctgggctgcgcaccgcttcgaggagatcgtctccggcaagcgcatcatccgtcctgcgtacaagtccattcgcagcggcaagcgcgattacgttcccatgagcgaacgctaggggcggggcggccgtcgactcgggtcgcctgttcgcgcggcgcttgtgcggccgcgcgccggatcgttcgacattgcgccgcgaacggatgtttcacgtgaaacatccgcgaccgaacgcactccaatgaacaacgtgctcctttcccaacgggcgaggagcgcgtttctttttgcgaaggattcgcccgcttcgctgcagtgcccgagttcttcgctgtctcctgagatcgctccgccacgaaggcgcccaagcccctcgctgcgtttcgtccgctccgccacgaaagggcctggtcccttaccgtgctccgtccggttcgccggcgctcgcggctcatggacgttttttgcgcagccttctgcagcaaaatcgagtttttggcagtcttttcctggtttcagcgcagtttgaggacgctcggcgccgtgcctgccggtaaaacgccaggtcgcgtgtttccctttatggacggagaagggctcagtctgccaaaccggcgattttgctgcgcatgagctgcccgatcatgcacggccgaagccggctccatgcgcgcgaagcggccgcctcccgaatgtttcacgtgaaacattcgctcgtgagcagggagttcaagccggaaggcaggaccgaacaaagaaaagcgcccggaaccagctggttccgggcgcgctgcgtttctggcggaggcggtaggatttgaacccacgaagccttgcggcttaacagttttcaagactgccgccttcaaccactcggccacgcctccgcatggggtttgcgcgtgtgcgcaacgtttaggatatcatgcagtcaatcgcaatgcgacaagaaattgaccgcgcatcgcacgaagccgcatcgctcgtccgtgtcggctgctcgtaagcgtcctttgcgctttcggctcattccacgatggttgcgctctcggggctttcagttgcggcggcggctccggctatcttgccgaagacgagtgcctgaatgaggccgttgccgctcatgtaggctgcacctccgcgtgaggagaatccttcggtgcagccgccagctgcatataatcccttgatcaggctcttgtctgcgcgcagcacgtgacctgctagatcggttgccatgccgccctgcgtatggcgaatctcgcctgtaaccttcactgcgtaatacgggccatcgaagctttccggcagatgggatcggttgaatttatcctcgcccttttcgatggcggcctgatactctgtgatcgtcttttccagcgtcgcggcgtccgtcccgatggcggcggccagctcggcactggatgcacctttcattacgatgccctccgcttcccactcagcgtatttcgcgctcttcgctacctgcgcgtcggtgaagcataggtaggcgatgttgtcggattgcgctatgacatgaggggacagttcggaatagccggtgtattcgttggcgaagcggttgccttcttggttcaccatgatgccgccgttgttcgcaatgccttgttcaagcgttttgccgttgtctactccgtgaaacgcatggccttggtaagcgcccatgttctggaggttcgcgcccagctcttgcgcccagaggatgccttcgccggtagctcctggcgccaccattttgaaagcatcaacggcctcggggcagtattgcgccagcatgtcggggttgttggcgaacccgctcgatgcaaggacggtgttctttgccaggatggccagctcgtccttgcccattttgccgtaagcgcctacgacgtcgtcgctatcgtccgcgagcaccagtccctgcatttcgcatgacagcatctgcgtgattgcgtcgttggcgctcatgcttgcgacgagcgcatcggtcagtcccttgccggcatcggcggtggtatgcatgcggtgcgcagtctgaccgtaatacagcgcttggtcgatggtccacaccgcgccgtgcttctcggtccactcgacgatgtcttttgattgttcggtcacggtgcgcactaggtcgggtcgaacgctgtagttgttcggacgcatgatgtccataacgcatgcgtccacgctgtcgttttcgcccatgtccatttgctgctgagtgcctacggcgggaatcttgccgcttgaaagcatggtggctccgcccagaacgcttgtcttctcgcacaatgtcacttgcgcgccttgctcggcagcgctgagcgcggcgcacaggcccgctccgcctccgccgatgaccagcacgtcggtttcggtttgcgtcatgccggcgatgtcgctcttgcgcttagcgaattgatagctgctaccttgcgacgaggtttttgctgcgcccccggtctcgttctcgttgggcgagcaagcggcgagcgcgcctcccgaggcaagcacgaccgatcccaaccccaagcccttcaaaaggtccctgcgtgtcagatttcccatgacaatccccttcctgtaacggtgcgggcatcccggcccgctcttggagcactatacgtttgaccgtgcgggtgcgaaaagaaactcttatatgccatgaagcgtcaactagaagtcgacgtatatcggtaataccaggtcaaaagggtgtacgtcatgcgcatcgacttatcttgcgatgaggagcgcaactttgtaggcttcaagcgcagtcgttttgtctatactgagaaaagggggatccgaccgcgtcgtcacttgtcgggagcggtcgaggggacgcgcgaaggccataggcgaggggaacaaccatggcaaagtttcgtatggatgtcgatcagaaaaggtattattgcacgctgtgctcggagggcagcatcactcgagccgcgcagtcgctttacctttcgcggcaaggtttgtcgaagagcatgaagagcctcgaaagccaactaggcgcgcagcttttcgtccgtggcaagaagggcgtcgagctgacggcggcgggcaggatccttctccgttatctgcacgaagagggtcggctgtgggatgcgtgcgttgccgatatccgttcggttagccaaacggattccgagctggtgcgcgtgggtttgctcagcatgtacgtggggtacagccagaagcgagggttgctggcgagcttccaagatgatccgcgcgtaaagatcgaagtggtcgacggcgaccatgatgcattctggaaagctatagcggaaggggagctggagcttgcgttttccataaagcctcctgatgatttgggattgccctcaataaagctatgcgacgacggtttgtcggtcttgctgtcggccagcgacccgttgtcgcgcaagaggttcatcgacttcgagactgatttgagggggaagacggtcatccagacgagcccttgcaaaggcaggctgtacgaggcgacgtttcgaaaatacggcatcaacatgacgttgcttatgcatgacaagaaccttatgttggctcaggtttcaatcagcaaaggctgctttattattcaaaccgagtacgcaaaaatgctggtcaccgatcaggtttgcatgagaccgctgatcaatgcgcccatcgagatggactctatgctggtgttcgcccctgcgctacgccctatggcgcgtgcggtggcgcgtcatctgctagcgccgtacggcaaggaaagcgaactcgatgcgtattttggcatataataagcgacatgaccgatgaagactacatgcgcatggcaatcgaggaagcgcgccgcgccgaagaactggacgaagtccccatcggggccgttgtcgtatacgagcccatcgatcctggaacgcgccgccccttggccgagccgcaggtgatcgcgcgcgcgtgcaacctgcgcgagactacgcaggatccggcggggcatgccgagttcatcgcgctcaagcaggcggccgagcgtttgggcgtgtggcggttaaccggctgcacggtgtacgtgacgctggagccgtgtgtgatgtgcgcgggccttatgcatcaagcgcgcgtcgaccgctgcgtgtacggcgcggccgacccgaaggcgggcgctctcggcacgctgtacgcggtcaacgcagacgagcgcctcaaccacaccttcgaagctgtctctggcgttctgggcgatgaatgcgccgagctgctgcgcagcttcttcgcgcgcaagcgcaagaaacgaatggaatcgaaatgacgcaaccgagcaagaacggcgaaaacgccgtagacatgctggccgtggctcgcatcgcgcagggcgtggacatcgcgggcttcgccggccccgatgccgtcaagctggtggcaccggcgaaagtgaatctgttcctcgacatcggcgcgaagcgcgcggacggctatcacgaggccgtcagcatcatgcatgcgctcatgctgcacgacgttttacgcatgaagctggcgccgggacgcggagaaggtctatccgtcgatctctcgtgcgttgcgcgcgaagggctcgcgatgctcgatgtgcccgtggagagcaacatcgtggcgaaggccgtgcgcttgctggctgaaaaattgggacgcacggctgacgagacggtggtcgcctgcctcgagaagcacatccccgccgaggccggtttgggcggcggctcctccgacgccgccgcggcgctgctgggcgctgcgcacttgtggggcgtgcctgccgacgatccgcgtatcgaggaagcagcacgaagcctgggtgccgacgtggcgttcttcctgcatggcggctgcgcttgcttcacgggcgtgggcgatgcgttcgaccatgcccttgcgcccatgaacggcaacgtcgtgctcgtgaagcccgagggcggcgtgtccacggctgccgcgtaccgcgcgttcgacgagcatcccacggccatttccgaggccgatcgcgaagcagccctcgaagcccagcgcgccgccgacgtgccgctgcgcaacaacctcgtgcccgtttccgagcacctgcttccggcgctcgtggacatccgcttgtgggctagcgagcgcgccgacgtgcagcgcgtgctcatgtcgggcagcgggtcggccgtgttcatgcagtgcgccacgttcgccgatgcaggtcgcgtggccgccgaggcgcgcatgcgcggctggtgggcgcgtgctaccatgtttggctcggcgcgtgcggccgtggtgccgaaccgctgaaatttcggcagcccgatgcattcgcgaaatctaagtgttacgattcggtttaccaatcggtagcggatttcctgaatggcatgcacgatggtagaatgctagccacgtaacagcaaaggagagctatgagcatcccattgatcatcatcctcgtcatcgtcgtcgtgctggttgtggccgtgatcgggctatacaacaacctcgtcaagctccgcaacatggtggataacgcctgggcgcagatcgacgtgcagttgcagcgccgtctcgacctcatcccgaacctcgtcgagaccgtcaaaggctatgctgcccacgaaagcggcactctcgaggaggttaccaaggctcgcaccgccgtcatgaacgcgcctacgcccgaaggcaagatgcaggccgacggcttcctcaccggtgcgctgaagaacctgtttgccgtcgcggaggcctaccccgacctcaaggcgaacacgaacttccagcagcttcaagcagagctgtccaacactgaagacaagatcagctacatgcgccaaagcttcaacgacaccgtcatgaagtacaacactgcgatccagacgttccctgcagtgctcatcgcgggcatgatgggcttcaagcagcgcgatagcttcgacgcgacggcgggcgcggaagtcgctcccaaggtgcagttctagccaagttcaacgagcgtcgcgtctctgcgcggcgctcgtcgaaaactattttgcgtagggttcgctgcgctatcttggcgcctcgtgctggcggccgtgcgcgctagcttcgctgagaggcgtcttgccgccgtggatcctgcgcccgtctatcggagcggcttcatgaagaaggtttcatcgcggaagcacgatcgattcggtcgcgtgctcgattccgacccggtctatcttatcgcggcgcttgcgctcatggcgctgctcgtgtcgttctacgcggttctgttggtgaatatgaacgccatcgatacgaaaaccgaggatctcaaggaacatccctacgcggtcaccgttgcggcaggtcgagccgaaacgctgctcatgcaagtgcgaacgctggacaaccgcttagcgttcgcgcgcacgccggagaccgtcgcaagcgttaaaacggagttcgcctccatcgacgaaaacctgcgcacagcgttcagggtggttgaacagcgccatcacggcaatcccgagaaagtaaaggacctggtaagcaactacgaggagttcagcgagttgcaggatcggcttatcgccctcagcttgagcgacgcagacgacgaggcggttgccgcttttctggcgagtgaaatcgacccgcgcatcgatcggatgctggaagacaaccaggccatcatatccgccgccgcccgttctttcgaccagttgtacaaggcggtcggcaaaacccgccaggataccatgttcacggcgtcggtgcttatgacggccgtgatggtggcgctggtgctgttcctcgcggtgatcaagcgcaagaaccggcaagagcgcgagctgcaggaaagcctgcggtgcgcgatggagaaggcgcaggatgccagcgaagcgaagtcgcgcttcctgtcgaacgtgtcgcacgacatccggacgcctctcacggccatcatgggactcgtcgatatagccgtcgagcatatcgacgagcgcgatcgcgtgaaggaatgcttcgacaaagtgcagctgtcgtcgcatcacctgctcaatctcgtgaacgacgtgctggatatgagcaaaatcgaaagcggtcaaatcaacctgtgctgcaagccgttcgacctgcatgtcgtcgtggaaacgctcgggtccatcgtgcgtccgcaagccgattcgaagcatctgacgttctcggtgttgcgcgtcgacgtcgaagaggggcttgtgctgggtgacgagatgcacgtgaaccaggtgctcatcaacctgcttggcaacgccgtcaagtacaccgagccgagcgggacggtaagccttgccgtcgaggagctgaggggcgacgagcgcgtggaatatgccgcccagcgcggtctttcgcttgagccgaccagccatgacggcttcgatatgtgtattcgcctgatccgcttcatcgtggaagatgacggcataggcatgtcgaaagagttcatgtcgcgtttgttcgacccgttcgagcgcgaggaggtgcctacgcgcttatcggtggaggggactggtctgggcttgtccatcgttaagaacctcgccgacctcatgggcggtaccgtacaggtgcaaagcgagcgagggcgcggatcgcgtttcacgttggtgctgccgttcgaagcttgcgaaggggatgcgtgcaaactgcagttggaggagtccatcgaggccgagcgctcggatgctgcggtttcggcggtgtcatgctcctggcagcatgtgcacgtgctgcttgcggaagacaacgagatcatcggcgagatagcggaggagatcatcgcttcgacgggcgccacggtcgagcgcgcctggaacggcctggatgtgctcgatctgcttgaaggcgcgcccgaagggcgcttcgacctcgtgttcatggatatccagatgcccggcatggacggcctcgaggcggcgcgactcgttgtcgaacgctaccgggaagcaggtcgcgcacggccgcctatcatcgccaccacggcgaacgcctacgaggaggatcgccgccgcgcgctcgacgccgggatggacggattcgccgtgaagcccatcgggaaaagcgaggtgtgccacctgtttgcgacgttcgtcgacgctaagatcgacgaatagatggctcttctcgatgatatgagagcaacgcgcgccggtctggtatgatgcggacaacgcaagctgccggatgcccgtgcatcccgacctgggaaaggagcactttccgtgttcgctcgactgttgcgcatcgtcccgatgcttatcgtgttggccgtggtggcggcaatcgtatacatcgtggccgcatggcgctattccccgaaccgagcgaaagagctgctcatcaggatattcacggctatcacgggcgccgtttcggcgttcttcctgctggtgtgcgcctacgcgtggctcgagcgcaacggagccgtgttcgatctgtcgttcagctttttgttgacggctcttatcgggcttgcggcgacgcggatatgccgcgcggtgtttttgcgccacaaccccgcgtaccgcatcaaggccgcgaagacgacgactccgggttcccgtgtcaggcgttggcggaagaaataggaaaaccctcttacgagggtttgaaatgcggtggcggagagctggggattcgaaccccagacacccttttggggtgtactcgcttagcaggcgagcaccttcggcctctcggtcagctctccgcggtataataggtgcggtttgctatgataccgtgaccacctccaagttgcaaggagcatgatcatgcaaaacatgagcggttcgcaactccgcgaatccttcgctttttcccgacgaaacgccgtgctgttttgcgcggcgctcctggcgctcgcatgcgcgcttgtggcgctggctcccgggcaggctcacgcgaaatcgtacaccatgccgaaggtggatatccaggcccaggtggaaaccgacggcgcgttgcaagtgaccgagcagcgcacgttcgatttcgacggcgatttctccgcggtgtggtgggccttcgacgggcttccgcagaacgcttccctcaagatcaacggcgtgcgtatggcgaacgtcgatgccgatggcacggtggtgggcgattggacgacgttgccgagcgaggcgttcgtgctcggctggcgcgaatcgggcgggcctgggaaagattcctactcgttcgacgcgccgaagaacagcgtgtacgtgttcttcaacgcctccgacgaccgtcgcatcatcgagctcgattatacggtggtcaacggggcgcaggcgtattccgacataggcgaggtgtattggaaatacgtgggctcccaatggaaagaggcttccgacaacgtcaccatgacgttggcgctgcccgtaccgcagggtaccgaggtcgtgccgggagagaacgtgcgcgcatggggtcatggaccgctcgacggcaaggtgaccgtgaacgccgacggaaccgtgacgtatgccgtgccgcatgttgcggcaggtcaattcgccgaagcgcgcgtggcgtttccggtgaagtggttaacgaacctgtcgcccgaaagcgcggcgctgcatcaaggggaaaaccgtttggacacggtgctgaaagaagaaaaggactggagcgaccaggcgaaccgcactcgcgttctttcgttggcgttcgtcatcggctgcggtgttgtctgcgtgctgctgctcgcctgggcgctgcgcgcctacttcaagtacggacgcgaataccagccccggtttaccgacgagtattggcgcgacgtgcctgacccctccatccatccggcggctatcggacgcctgtggcgctgggatcgcgagagccaagacgatttcacggctacgctcatgcatcttgcgcacgtcggcgccatccgcatcgacgcgggcagttacgaggaacccggcgcgttcgggcgcatgaagaccgtggacgactattacatcacaaggttgcctgctgccgacaacgtgaccgatcccatcgatcgtcaggcgttggatttgctgttcggcacgttggccgggggagccgactcgctgtggttcggcactatcaagaagtacggcgaagatcatccgcaggagtttgtcgacgcgatgcagggctggcagggcgcgctttcggcggcgacgaaccgcgaggatttcttcgaggcgaaaggcaagcgataccagggctacctcatcgcgcttgccgtggtggtcgctttgtccggtgtcgccatttggatactcatgtcgaacttcatccctctgatattcatgattcccaccgccatcgcgttgggcgtgatcgggaactacatgccgcgtcgcagtgtgaagggcaacgagctgacggccaagagcaaggcgctgcgcaactggctgaccgacttctcgtctcttgacgagcgtccgcccaccgacgtgaaggtatggggcgagttcatggtgtacgcctacctgttcggcgtggccgaccaggccatcaagcagctgcaaaccaccatgccgcagctgttcgagtacgacggatctatgggcatgacgtacatgccttggtggttctggtacacgggaggccatacggctgccggctcagcgatgccttcggttagcgacatgctgcaaacgtcgatgacgaacacgatgtcaacggctcaggcggcgctttcgggcgctagcgggaacttctccagcggcggtggattcggcggcggcttctcaggcggcggcggaggcggcttcggcggcggaggcggcgcccggtaaaccaagcaggaacgaacgcggccccggcaaggggccgcgtttttttgtgcgcgtatccgcgaacgaggttccacgttgccatccgaggggcgagcggagcgcgcctggcttccggagcgaaggcgcgaagcgccggagcatgaacaagcacgggcaggccgtgtgcgccaccgctgtcatccttcgactccggcccgcggcctccgctcaggatgacagggcctgctagtcagtatgaacatgacttaaaagatcatggacaaaaagcatgacttttcggtagttttccaagggaaaaccagcagagtggaaaaggagcctggaagaaaccccaggtaaacggaacgcctcttatcgcgcgccaaagcaaaactacggaaaagtgcctgtttttgtccatgactctttaagtaatatatagaagcgcacgaaaccagggcgtacggaagagaaactcggccggcttttcggacgcaggaagcatcggcttttgagcgcccttcgccgcggcgttcctgcgaaacatcccggctttcgagcttcttcctgccggaatactctccgattgacgatacgccaagccgctggtgtcggcgctgctgttcgcggtgcacatcgtgtacgtgtcgaagttctcggggacgaacgacgtgctggtgctcacggtgatgcagttcttcatcggcggcgcgtgcggcgtggcgtgcggcgcctgcttcgagacgctctctcccgcgtgggccctcacgcccgagttcttctggaacatggcctacctggtcatcttcgcgtcgtgcgtggcgctggtcatccagaacgtggcgctggcgcatgtgccgcccgcgcaggcgtcgctgttcctccgtctggaatcggtgttcggcgtgctgttcagcgtgcttctgtacggtgagcaggtggggctcaagctgatcgtgggattcgtgctgatcttcggcgccatcctggtcagcgagatgttccccctgaaacgcaaggacgttgcaaccaatcaactggaagcggtgccggtcgagctgccatgatacaattgctcccaatgtgtgcagtaagggaggaacctcatggcagaaaaagacaacatcgtgctcatcggcatgcccggcgccggcaaatctaccctcggcatcgtgctggcgaagatcttgaactacgacttcatcgacgccgacctcgtcatccagaacagctgcgacaagacgctgcagaagctcatcgacgcgtgcggtcccgagggcttcatccaggtggagaacgagattctgcgcgagctgaacgcgtcgaagtccatcatcgccacgggcggctcggccgtgtactccgacgaggccatgaagcatctcgccgagatcgggaccatcgtgtatctgaagatcacgtacgaccagctggtcagccgtctgagcgacctgcaggagcgcggcgtggtgctgaagggaggcatcggcatgagcctgcgcgagctgtacgacgagcgtctgccgctgtacgagcagtacgccgaagtcaccgtcgacgtgaacgacctgtccatcaccgccgccgcccgcaaagtggccgacgccctgaagcaagcgtaatcgaaaatgagacaaagggaatgagacaaaggaacggagatgccgtctcgtgtcgatctcgtgtgagacaccaaccccgtccctagtgtctcacccggcgtctcgtccaagcaagaaaacgccccgcagctcgttacaagctgcggggcgttgtcgttgctggtcgaagcgcgatgcggctctacaggccttctgtttcgaagcgcttctcaagcgcctcttgatggatgctgtactgcagcgccatctcttttgctacgcgtccgctcttcacgagatcgaacaagctctgatccatcgtgcgcatgccctcggcaccgcccgaggcgatggcgctgtccagctgatgcgtcttctcctcgcgaataaggttgcggattgccgtgttcgtgatcatgatctcgaaggccggcgccgtgccgccgtcgacggtgggcacaagctgctgcgacacgattgcctgcagcaccatggacagctgaatgcggatttggcgctgctgcgaagcggggaaggcgtcgatgatgcgatccaccgtgcccgcggcgcccgtagtgtgcagcgtagagaacagcagctgcgccatctcggccgcagtcaccgcagtgccgatggtgtcctggtcgcgcatctcgcccagcaggatgacgtcagggctctcgcgcatggccgagcgcagggcctcgctgtacgttgccacgtcggtgggcacttcgcgctgcgtgacgatgcaggtgccgtgcttgtgcacgtactcgatggggtcttccatcgtgatgatgtggccggaacgttcatggttcaagcggtcgatgatgcatgccagcgtcgtggacttgccggcgcccgccgggccggtgaccagcacgagccccttctggaacttggccaggcgcagcacctcgtcggggatgtggaattccgccggatcgggcaggccgaaggggatgacgcggatgaccgctccgtacgaaccgcgctgacggaagacgttcgcgcggaagcgcccgatgccgggcagggcgaacgagaagtcgtcgtcgtgattgccgttctgcatgaaggtgtccatgttgcggccagatgcctcgtagatggctccgacgaaggcctcggtgtcggccggcttgaacggtgccgaatccagtcgaacctggcggccgctcacgctgtacgccaaaggaagtcctgcgataatgaagacgtcggatgccttcgcgtccaccatctcttgcaagagctgctccagtttcatcgtgcttctcctatcgtgtttgcgcggcgcccgaccagagcgtggcacccgggccgtcgttcgtccactgcgttgtcgctttccattggctgatctcgtatgttgcgttcgcggtgatggttaattccacgtcaagcgtgcgcccgctggaggaggcgaacgtcatgagcactctcgacccgtcgcgctgcgcgtcggccggcagcgcctcgtccacggcggcaagcgcttcgtccagaccgcctccggaggctcgcacgtcttccagagccgcgtcgatgacggccaccgcgctttgagcggcttgctcgttctggtaagtatcgttggtgaacagggcctgtttctcggcggcggaatacgtcgcttgcgcggtggtagccgaaagcacggccatcacggccaggcacaagatgatgaccaacgtgaacaggctgatggggccgatacgaacgctgccgttggtgctgttcatcgctgcaccccctcgttcgacacgtagcgagccgtgtctatctggtaggttgcttctccgccgcaagatacgtagatgtgggcggtgtaaagcgtgccacccggttggctctgggcttccacgatgcgcgtcaagtcgtacacgctcttgtcgaggacgtcgatcggcccctcgggttgtaccagctggccgtcgacgaggacgtactctcctcccgtgttgccgctggtcggatcggccgcgaacgcttcggcgtcgttcgatgcgaggatgatggcgttcgacaggcggtcggcttcgatgcttcgttcgtgcgctccggcgatcacctgcatgatcacggcaagcgacgcaatgagaaacaccaggagcacaagcgcctccacgatgaaagccgcgccgtgccagggtcgacggtcgtgatcgttgccgcggcgcaggcgggaaaggtcgatgcccatcaggcacctcctcttacgctgcgcagggcaaccgaggtggagccttggtcggtgtgcacggtcagcaggccgtcggtgtaggtgaagtcgaaggtggaagacctcacgatctcccgagccttctcgggcgtgaacgccgttccggcgcgcgtgtactcttccacgattgccccctggtaggcgtacaaacgcgtctcgtagtcgccgttgcccaggtgttcggtcagcacgagcgccagcccttcgggaccgtcggccacgcctacggcgtcggtcccgtcggtggctcggatggagttcgcgatcaacgacagccccagtcgggtattgtcagaggaagagcgcacatcgttcgctgcgcggtaggcgctcgtgcccaccagaagcgccagcagcaggaacagcgcgatgacggcgaacagcagcgtgatgaacgcccgtccgcgcgcctttccatcgcgggcttcggagctgcggttggaccctgtcgcctggatcagcgtttgcaccatatcgcccctcatttcgccaacaccacgacgttcggcatgacgttgtcggcgaacacctcgtacgtgatcgcgtagtcggagcgattcacgaccaacccgtagttctcctcgagataggcgagcgacgaggggtatgcgccctcgatggcgcagcactgcttcgcgctgttcaagatggcgttgcgcaccgacagctcgccttgctcgcgcagcgatgctccgatggcgttcgaggaaagccagacgagtacgacgaccagcacgatggcgagcaatccggccatgcgcttgcgggtgcgcctcctgatttcctgtttggtcagctcgtggtacatgggactagccgatcgatcccatgatgccgatgagcgggagcatgaccgcgatgagcgtagcccccacgcccacggtgaggaacgcggccagcgtgggctcgacgctgtcgatgaggccgtcgaggcgtacgatagagtcgtcgaagaacgtgtccgacaggcttgccagcacggtttccaagctgccagagcgcgtgcccacgaccagcatgcgggcgtagatgggctcgaagacgttgttgtcgaagatggcttgcgcgaggctcttggcctgggcgggatccgtcatctgcatccgcactgcttccagctgggatttcaggtttccatgatctaccatggccacggccttctccatagcggtatcggtgtccacgccggcagatacgaacgtggcgagcgccgcggtgaaccgactaacggccatctggcgcataggcccgcgcgtgaggggcgccttttcgaacaggcgcagcaagcgctggcgccctgccgccgagcggccggccagcacgcccagcactacgagcacggtgcacagcagcgtaacgcccagagcgatccagcctatgatgatggaagcgttcacgtatccgaaggagccggccgtcaagttgccggtgaggccatggtacacatccacgaacacgggcagaatgacgatgacggtgaacagcaagatcgccgacatgacgcacagcagcgcagccgggtaggcgatcgcgttctttatcttggcgtacaggcgatcttcctcgtcgtagtatctcgccaagctccacagcacgttctctaagcggcccgcgtgctcgcctgcgcccgccatgtcgacgacgtgggaggggaagcatcctgaatcgtccatagcgagcgccaggggcttgccgacgatgagttctttgtatacgtcgtcgcacgcgcgtttgaacgcggcgtcttccatgttctcgcccagcagaaagacggcttcgtccatctggatgccggcggagtgcatgacggcgacgctttcgcagaaggcggaaacagcgctgctctcaagcatcttcgtggccatgtcctacgcgctccttttgtctcgtgctgctacgtgtatcgtcataatcagtacgtgtagaggtcggtgtacgcgattccgtctcccacgtagctcgacccgcttccggccgcgaacgtcgtatcgatacgcgtccacgtgttctgcttgatatcgatatgggcatcgacccatgtgccgtcaatatacaccatgttccaagcgtggtatatattatcgggcgatacgtacccggtgattatcttgcaggggatcccttggctgcgcagcatggcggccgccaaggatgcgtagtcgaagcagattcccgagccgtcggcgatgcacgaatcgggattgggaaggtagcccgtcgcatcggcaagccgagcggctttgtcctcgtcgtatgcgatattttcaacgatccagtcgtagatcccgcgcaccacgtcgccctcgttctgggcgtcggcggacaggttgttcgccaattgcgtgctcttgctggacgcgtcgtagtcgcagtagacgctcggtcggatgaacggttggaattcgtcagccagcgtcacaggctggtcggcgagcgagtacagctccgaataccgttgtccggtagtgttttcccagacggtgaacgtgtacgcgccgctgccttgaacgagagggcatgagatgggcgtgccgtcgctgggcagatcgaaataatactgcgtttccgaaccctcaaacgaaacttggagcttcaagcgggttgatgcagttgccgagacggccacgtagcctttcgccaggtttgaagcgtcgatgctcacgccgttttcgccgccggccgccgcttggtcgaacggggagagcgcaagctccggccgctcgtaggccgggccgctcgtctggctctggccgcctgaggggttcgaggttttgccgaccgcgtcgttttcgctacatcctcccagcgcgacgagcgtcgtcgccagaaccgccgcgcacgcgctgcggacaatcgcacgcagcgcgcgggcgcgccgatgttgcggcgtgcaagctccgtcgcgttgtttccgtccagcggctgtgatgccgagcaggtgcatgcgccctctctacgattcattgtctcggagggcattatacccctccttgcgcacataccggatactgttgattttggcacgaaaaagcgattcccgctacgttagatgcagatgcttgtttcttaaatggccagataaaatgcggatttggttaacgcgttgcccaattggtgttttaatgcggtcgcttcaagagcatttaggggcgcaacgtggtagaatatagattgggttataggctatacccttgttctgtattacagaacgtggtatgtcgggtctgtcacctaccataagatagacgagttttcagcatattcgacaacgtatgagctcatcgacaagcgcagtgcgtctacgtgcttggatcgggactgcgaagcggttcgcgacgaacagccgatccttccgtagctggcaaaagtctgggtgataggtatgttggagaaaatgctagatcttaaaaacacgttcgaaggcaagttccttgccgtcctcatgtctgtggtgttggtcatgtcgatgacgaacatcctggcgttcgcaggcaacgaaggtcagaaggacggttcgaaaaccgagtccgttcccaccgatcaggtggtcggcgagtccgacaaggaagcggtcggcgaggccgtgcagcatggcgagagcgctgcggccaaggatgccgatgcgtccaagacgacgccttcccagcctcttgtttcgacgacggtcgacgaagccgtggtaacgttcgaaactcagaacgcgttcgtgtccgtgaaggatcagctgctctccggcacgatgctgaccaccgaactgcacaaagagctgaggtttacagcaagcgccgacaccggcttcgagctgggagccatcaccgcgaagaacgccgcgaacgccgacgtgcccgtcaccacccaggacggcgtgtctagcatcgcggccgagtatgtcgacagcaccttggtcgtgtccgttgtcgccgctgcggttgtctccgatgagcccgaagttgaaaccacgcctatcaccagtgataccaagatcgagccgggcgaggcggacgaaaagggcgaacccgaagagccgaaatcggaagagcccgagaccgatgagcctgaagcccccgttgccgacgaagacgtcgtcgaggtcgaagccgacgtgagcaacccggcgttcgagggctatgcccaagccggcaacgtgctggtgaaggtaaccgccgccgaaggcgtgctgcccgaaggtgcgaccgtgcaggcgacgcggatcgagcgtcaggacgttgtggacgccgtggccgagagagtggagagccagggcaaggtgctcgaggatgcgatcgccattgatgtgacgctgctcgacaaagacggcaacgagatccagcccaatggcgctctgaacgtctgcttcttcgacgcgaacgtcgagggcgaagaggtgggcgtgtaccgcgtgtccgacgatgcgtctcaagtcgagaccatcggcgcccgccaagccgaccccgccgtccaaagcttcgacgtggatcactttactatttatgtggccacgggaagcaattatgccagtacaggcatcaagttggattcttcttcaatagaggtaggggaaacgattaaggctcttggagagcggaagtggaactcgaaaggatactcttggactagctctgacgcatcggtggcgaaagtcgctttctcaaaggagaatcgcgcagacatcgtcggtgtgagtccgggtgttgccacgattacctatagctacaaggtgggcaatcgaacgtataccgacaccgccaaagtgcacgtcgttccgtcggtcgtcaagcacacggtatcgtggtacgtcaatggcgatgtttccaaaagcacgaaggtgcgagacggggaggtgcccagctatggagggactcctaatcgtgcaggcgattggcagtacaagcagtttgttggttgggccacagctcccaactcgaaaaattatttgactgagggcgagctgcctgccgtaaccgaagatgtgtcgtactacgctgtattcacttctcaagcctatttctatttcgttcttgaggggcgttcgaacaccagcacggttgccaaggactatatgtatgccggtgaaggaaccatgatcgttcccgatgggtttaatagtggcgaccgctggtatgacgggtcaaatttcagcattgctgattatatcgtctccactccttccgacgaggccatccgaaatggtatcagggcagcttacgcagattactctcctgattggacgtataccatagactggactacgctgagcgttgcgggttcgtcggtcgattaccggtataacacctttgattatggcaagtcgatgcataccgacggtgcgttgagcatcaataaggatacgaccatcggcgtgacatacctcacgcaaaaacctgatggaagtgtggtcaccaactccacctctcatgacaaaaatgttgcgttcgggctcaatagcacagttaatacggatgccccctcttttgagaccgatgggtatacgtacaattctcgtgtcaaccataatggagccagctatgtcttcgacggctggtatctcgatcaaagccataccactaaagctcctgacagcgtttccccgtcatcgtcagcctcgttctatgcgcgttatatcgccaacacgaagacattgacgtaccaagccaacggtggcgctttttcggatggtactatccaggacaaaacggccgttcagcaagtaggcgcccgtgtctccttcatttcgaatccctcgcgagatgggtatgtctttacgggatggaaagataaagatacaggagacgtttattctgctggtgtttccggcatgattatgccggatcgcgacgttacgcttgtcgcgcaatggcagggcgtcatccccatcaagcttctcggcgatgaaacgaagaaaacctacagtggaacgaaacagagctatactgggtttactgtttccggacttgacatgggtagctatacggtttctggcgtacaagcgcttgcacagggcaccgacgtggggacgtataagggcaccatagactattctgggatgcgcatttttgagaaatcgtctggctccgacgttacaaatcaattcgaagtggttgaagctagcgagcctactttgattgtagaaaaagccccgatttcgattgttacgcccgatgattctaagctctacgatggcgctccgctgattgctacaaaaggcgctgagctttcgggcttggtcaatgatgagaccgccacccttattgttatcggaagtcgtaccgatgtcggaacttccgataatgcatatcaaatcgattggagtggctcggctaaagagtcgaattacttcattgatgaggagactatcggcacgctcgagatcgccaagcgccccgtcaccgtgaccgccaagggcggcgagaagcagtacgacggcaagccgctgaccgccgccgacaccggctacgacatcggcggcgagggcctggtcgagggccacgaggccgacgtggcgctctccggcagccagaccgccccgggcgcctcgcccgccacggtcgagtccgtggccgtcaaggacggcgacgtcgacgtggccaacaactacgacgtcgccaccgccgacggcagcctcaaggtgaccaaccgcgacgccaagtacgaggtgaccctcaaggccaactcctcgaccggcaacgtctacgacggcaccgagaagtccgccaagggcgtcgtgaccgaccgcttcgtcatcgacgacgtcgagtacgcggtctccggctacgagacccaggacccggccgaggtcgccgcgggcgtctacaccaacaacgtctccggcgacttcaaggtcaaagaccccgccggcaacgacgtgaccagcgagttcgcggtccacaccgaggacggcgagctcgagatcgccaagcgccccgtcaccgtgaccgccaagggcggcgagaagcagtacgacggcaagccgctgaccgccgccgacaccggctacgacatcggcggcgagggcctggtcgagggccacgaggccgacgtggcgctctccggcagccagaccgccccgggcgcctcgcccgccacggtcgagtccgtggccgtcaaggacggcgacgtcgacgtggccaacaactacgacgtcgccaccgccgacggcagcctcaaggtgaccaaccgcgacgccaagtacgaggtgaccctcaaggccaactcctcgaccggcaacgtctacgacggcaccgagaagtccgccaagggcgtcgtgaccgaccgcttcgtcatcgacgacgtcgagtacgcggtctccggctacgagacccaggacccggccgaggtcgccgcgggcgtctacaccaacaacgtctccggcgacttcaaggtcaaagaccccgccggcaacgacgtgaccagcgagttcgcggtccacaccgaggacggcgagctcgagatcctgccgcgcgaagttacgctcgcgtctggaagcgccaccaagatttacgacggaacggcactggaacttcccgatgtgacagtgggcggagacggtttcgtcggtactgaggcgagcgttcgggcaacaggttctatcaccgatatcggtggtccgatcgataacaccattgttgtcgaacctggcgaagggtttattgccgctaactacaacgttgtctatacggttggcaagctgaccgttacttccgcctccatcgatccggatgatccgagctatacgggcatccagatcaacaatccgtacgacgtgcagtacaacggacaagaacagaggtggatcccttcggtgttcgataggaacaaccataagcttgttacgggtaccgattacacggtttcctacagccaggacgtcaggaacgttggcgttgtgaccgttaccatcacgggcatcggcaactacatgggtacggtggagcgtgcgtataacatcacccctgcacctgccgttatcagggtgaacgattcttcgaaggcttacggcgaggccgatccgggctttacgggagcggtcgagggcctgtttggcgatgatttgctgggcgacatagcttacagtcgtacgaacatcgatgaagaggttggcaattacagcgatgtgctgactgcgacggtcggcaacctgaacggcaactacacctacaccgtcgagccgggcaacttctctatcgtgcctgccggtggaaacgtcgttaccattgacgcgacaggtttgaccaagacctacgacgggcagcctgtctcggttgtcgccgaggccagcgtcgacggctccgcgttgctatactctgtcgacggttccacgtggtcggatgccaatcccgagttcacaaatgccggtacatatacggtgtatgtaaaggcgacgcatgatggttatgaggaaagcgcgcccgtaagtgccactgttgtcatcaaccctgctcccgtgaccatcgctgttgccgatgcttccaaggttgccggcgctgacgatcctgccttcagcggcacggtcgaaggccttgtggccgagggggatctgggcgatatcaactacgtgcgtcctggtggcgaggaagccgcaggcgtgtatgttggcgccctgacggcgctctacacgcagaacgggaactacagggtcgccgtgctcaacggcaccttcaccatcacagctgctcccgtgacgccgccgaccccgccgacacctccgacctcgccgactccgacgccgctgcccacgccgggcaccgttccgccggacagcccgatagcgcccgtcgtcacgccgatcgtcgatgcgctgcagggtgcggccgaggcggtcatcggcgacaacgatacgccgcttgcgagccatgaccatgcgtcctgctgggtgcattggtacatcatcctcggcatcatcgtgacggccttgtacggagcttgcgtggcgctgcgtcgcgggttgttctcgcgcaagctgaagaagtacgaagacggattgaccgggggcggcgaccccgctcccggcgctccctcgatcggcgacgacgcttcggcgccgatagcgccgaagggcgctcctgcgggtgcgacgttggctgccggattgggcgaataggggtttcatcatgaagaaaagcaacgtgatagtattcgtcctgctggccttggcctcagcgttcttcctgtggctctggtacttcctggggctcaaccgggtggacgagccgctcgatctggttttgtccatcgtgtggtggctggtcatcgtggtggccatcgccgtcatcgtgaagatggagcgcacgcgtcgtcagcgggttcgcaccgtgtacgtgggcgactgtgccacgttcaacagcgagcagggcttggcgactatcgaaggctctcagccggtgtccgaggtgatcgcgggaatcctgcagagcttgaagtacgatttctcgcgtgcggattttcccgataaggatcgcttcgtcgtgaagtatttcgtacgcacgaagcagttcgaggccgaggagaagcagggttccgatgcggtcgtagactctgagcaggcgtctgccggagcggcgaagccgcagatccagcagaaaacgtggacgggagaggtgttcatcgtggagacgaaggaagagcgtcccttcggctcgcccgaagaattggcccgcatcctggcctcgctcgagcaagcagcgtaaagaagcggccccggtgacggggtcgctttcgtcgttgcagcttgtgctccacgccgcttctgcgctgtgctctgcggatgcagcgattcgggacgcgctctggtgcgctagctctgccgcgcttccacgaacgttttgatcacagagaccgctcccagcgcgtccaagttgccggagttgatgcacaagtcgtagtttcgcgcctgcccccagttctcgtcggtgaagtagcgatagtagctggcgcggttcttgtccacgcgtgcgatgcggctgcgtgcgtcgctctcggacaggttgttgcgccgcatgacgcgcgcgacgcgcgcttccatgggcgcgctgacgaacaggctgaccagacccgggtggccttccaatacgtagtcggcgcagcgcccgacgatgacgcacggcccctcgttggcgatggacctgaggatgtccacctcggttttgtatatacgcgaggccaccgggtgctcgatgtcggtgccgcagaagaagctgttggggttcagcagcagcggccgcatgggcttttcgtcgaagtcttccaccacgtcgccgctgaggccgctctcctccgcgatgcgcttgagcaggagcttatcgtagtacgcgatgcccagctcgctggcaaggcgctcgccgatctcgcggccgccgcttccatactccctgctgatggcgaaaacgagatgctggtccatgctggccccttccgtgttcctgcgaactcgacgcgatttcgttgaggatattgtacctgaaaaaaggccgcgcccggagagagggcgcggccagggagggaaggacccgagcgcgatgcgcaaggtcgcaggggttggtacgctatgccgagaacgctgcggcgttcttgccggcgatgcgtccgaacgtgtagatgtcggacatcgagcaggagcccaggcggttcgtgcccatcttgtggccggccacctcgccggcggcgtacaggccgggaatgggggcgtcggcgtcgtcgaggacctgcgcgtcggtgttgatatgcagaccgcccatggtgtagtgcacggccggcttgtaggccatcaggtagtagggaccgccctcgatggcgttgaagtcgccgcggaagttgaagtcggggtccttgccgtccttgcagtactggttccacttctccacggtcttcgccagctcggccgcgtcgacgccgaagggctcgcacacggcttcaagcgtgtcgcccttcacgatgaccttgcgcgcctcgaggttctcgtactcgtcctcgtgggtgaccagcaggcccgtctcgtcggcgttcgactggttgaacagcatgtacgccttgccgtcggtctgctcgacgatggcgttggacagcacgtcgcgacggtcgagctcctcgacgaagcggtcgccttccttgttcaccatgatggcgcggctctcgaggcgcacgtcgcccacgtacagcagcgagccggtttcggggtcgcacacagggtacgtctggatgtactgcatgtcgatgaggttcgcgcccgcagcctcgcccatggtgatgccgtcgcccgtggctcccaccgagtcggtggacaggatggagtcgtccatggccgggttgtacttcacgcgcatgtcgatgttcgagccgaagccgccgcttgccagcaccacggccttgcacgcgatggtggactcctcgccggtcaccgtgttcttcaccttcacgccggtgatggcgtcgccgcttttcaccaattcgacggcgggggagttcttcgccagcgtcagcgtgtcgatctctccggcgcgcttcgtcagcttcgtggtcatctcgctgccgctgtgcgtgatggggatgatggagcgcttcgtgttgtggccgccgaactgcatgaggtcgtgcttccacgagatgccgccttcgaaggtgagccactgcgagctgtccagcgcgccttccgcgatgatctgcacgagggcaggatcgcctgcgttgtcgccgccttccagcatgtccttcgccagcgcgtcggggctgtcggcgatgccttcctgcacctggatccagttgcccggcgcggccatctcgccgcctgacagcgcggtgtcgccgccgaacactcccatcttctccagcagcacgacgctcttgcctgcgttcgccgccgtgatggccgccgcgaagccggcaccgccgccgcccaccaccacgacatcggccgatgcgggaagctcggtctgcgcgggcgttgccttgtcgcgcttcctccaatcgctcgacttctggccggcctggtcgagcgcgtcgcttacggcgccgatgaatgccatgctggaaagcgtggctcccgacacggtgtccacgttcagcgtctggttgtccacgatcaactgcgtgagctcttccatggccacgtcgcccatgcccggcgtctcgcgcgagttgaggacggtgatgcggtccaggttgccgtcggtgaccatgacctccacgtcgaactgcccgtgcttgcccatgcccgatccgatgccggcggagctgcccgatcctgcgccgttcgagccttttgcattcgacgagccgctgggcgcgcatcccgccaatgcgagcgtgccgcccaaagcggccacggcgccgccggtgatgaactgcctacgagaaaaacgttccatgatgcttcctcccttacgttgccgacgtcgcgcaccgacgtcgggtatcccaggcgcttactccctgatcaagcgctgttcccagactatcgttctgcggtcgagcgacaattgtccgtcggggttaaatgcataacccgcggtataaccctcttgcaagctggactttcttgggtattatgggagggcgattgaggggagaagcgtgaccgagaaggcgcaacaagggttcgtcgatcgatggaaagccgtgctgcttcgggtggcggctattcccttcgtgtttttcggcgtggggttctaccgcgcttggcttgcaacgttctttcgctacgatgcgtttccaaccatatcggtgttcgattactttttgttcgaaggggcgatcggtatcgtctcgttggcgttggccttcgcggcgcgccgtgtgacgccgctgtgggcgaaccgcaaagcggtgctggccacgggcgcgtgcatggtgggcggatcggccctcatcgtgttggcatgcttcgcggtaccgtccccggcgttgaaggttgcggggctgcttgcggcgggcggtggcctggggtcgctcatcctcatgtgggccgagttctacggctcgctcaaccccatgcgggtggcgctgtaccacgccatggccatcttcgtgggcgaagtggtgaagtggctgttcatgggcatgtcggtgccgtatctcgcgtttttctccatcgtgttgcccatcgtgtgcctggcgtgcgtgcgttcgagcatgacgcgtctgccggagcgtgatctgcctcctgccatgaaagaaggcgacccgaagaccatcccgtggaagcctatcctgctgatggcggtatgcacgttcgcgggcggcttcggggccctgccgacgcagctgctggtgccgggcaacgtgctgggcgcgatgttcgtcacggcgctcatgtttttcggcgtgctgtccgcatcgcgctggttcaacttcgacaccatctaccagctggcttttccgctgttcatcgtcggattcctgttcgttatgcccaccttcgggtcgaacgcgcaaatcatggcgctgtgctacgacgcgggctacaccatgctttccatgtacatcatgatcgtcatgagcaacatcacgtaccggttcggcgtgaacgcggtatggatcaacggcatcgagcgaggcatccgctacgtggtcgagctggtagggtggctcgcgttcgccggcgcgtcggcgaacctgggcgaggaggccacgtctatcctgtacggcggcgtggcagttgccgtggtgctgacgttcgtcgtgatcttcttcaccgagcgcgggctgtcggcgaaatggggcgtggtgctgaaggacgacccgatgggcagcgcatcggctgaggggcggatggccattcgcgtgtccgacctgtcgcgcgcgtacaatctcagcccgcgggaggaagaggtgctgcagcttatcgcccagggcgacacggtggccgagatcgaagaggttctgtacgtgtcgcagggcacggtgaaggcgcacatcaaccatatttaccgcaagttcaacatccacagcaaaagcgagctgttcgaactgctcaacgatgtggagaagcctgtgcgcaagggtcgccggtcttcttcgtccgcttgggaggacgaggagcggcaagcaggataggggcggaaccggttgcgcatgcaagaacggctcctcggcgagggtttgccgaggagccgttctctgctgttgcgcgcttgacgcgcggagtaggttagttggccgcgcccaggcggtcgtccagcgggtcgatgggcgggatgtcccagttgtcgccgggcaggtgcggcgccatctcgtcttcgttgccggcagcggccaggcgggcgaagtagtccttcgtctccttcaccaccacgccggacagcgcgatgagggcgatcatgttcggcagcgccatcaggccgttgaagatgtcggcgatggtccacacggcggccacggtcatgtaggggccgatgaacacggcggcgatgtacagccagcggtacgtcttcacggctttcatcgagccgttgctgaagtactcaaggcagcgctcgccgtagtagtcccagcccaggatagtggtgaagccgaacagcaccagacatgccatcagcacgaatgataccacttcgccggggatgaagggtagtcctgcctggaacgcggcggtggtgacggccgcgccttcgagtccggggatctggtacgcgcccgtcatgaccagcgccaggccggtcatcgagcacaccacgatggtgtcaaggaacgtgccggtcatggacacgagaccctggcgcaccggctccttcgtctgagcggcggcagcggcgatgggcgcggagcccaggccggcctcgttcgagaagatgccgcgcgcgatgcccttctgcatggcgatgatgatggcgcccagcatgccgcccgcagccgcctgcaggccgaacgcgctttcgaagatggtgacgaacgcgccggggatcttgtcgaggttcgtgacgatgagcagcaccgagagacccacgtacagaaccaccatcgcggggatcacgcgctcggacaccttcgcgatgcgcttcaagccgccgatgaccacaaggcccaccagcacggccagcacgatggagccgatgacggtgaagatggagtagtccatgccaaggatgctcaccgtggcgttcttctcggggtcgaagaacccggtgatggcgctggagatagagttgacctgcgtgaacgttccgatgccgaacaggcccacgcacatgccgaagaacgcgaacagcttcgccagccagcgccacttcatgcccatgccgcgctcgatgtagtagaacgggccgcccagcacgtggccggtcttcttgtcgacgctgcggtacttcacggcaagcaggccttcggagaatttcgtcgccatgccgaacagcgctgccagccacatccagaacatcgcgccggggccgccggcgacgatggccgtggccacgccgacgatgttgccggtgccgatggtggctgacagggccgtgcacagcgcgccgaagctggtgacttcgccttcgccgccggtttcgttcttgatcatatagcgcagcgcgcgcggcagctgccggaactgcacgccccgcaggcgcacggtgagcaaaatgccgccgaacaagatcagcaccataagcggcacgccccagatgaagtcgtctatagcgacgagcccatcgttgatcatactaaaaaagccttccaccacgatcctccttcaaccaacttcgttcgggcaacttctgcgaaacccgtgtacgacgtggctgttctggaggatgcgaaggaaagcataggatcatgctcgcgcgacaagctaggtagctttgctctgtccttttgcctgagagtttcagcggcatcgcgcttgcggcgatgcgccttgccccttcggcacccgatccgacgatcgggattctccagaggccccttccgcgccctgtctcgcaagatccaggacgtatcaacggggtgacgctatgaaattgtgcagctgattgtaacaaggaatgcatccgttggtaacccgttatttgactttttcgtgctaaagggattgttgcgggacggtgtcgatgccgctacgagcggaacaccgttcgcatgcctcagctgcggacggcgacggtctccttactgttgctgctattgcaacattttcacacgaggaggtcttctatggctccccagccaactgttcctacctgtccggtttcgcgcgcgggtcgcttgcgcgcgttcttcgttctgatagggctggtcgccctctgtcttctggcgttccgctcgccggcgttcgccgaggaagcccagcccgatccgtccgacgacgcgcctacgccgcgcgcggcgatggacgtgaccgacaaggtgtccgtcgacggcgtcaagctgcagaagaaatcgggcgacagctggttggacattcccgccggcaccacgctgaccagcggcgcgtacgtgcgcatctatatcgactggagcattcccgatatgacggacgtgcatgcgggcgacacgttcacgttcaccgtcaacggggatgatcacttcctggccagcgatttcggcccggtgaacctcgtcgatcccacgacccagaaggtgatcggctcgtacgtggtcaacggcaaccgcgatgcgaacggcagcatgatccccggtcaggacatcactatcgtgaccacgctttccgacgatggggcgcagttcccctcgctgcacaatggcttcttctcgcttgagggctacgtgacgggccaaggcaacgatatcgtgttcacggttaacggccaagcgcttccgtctatcggcgtcgaaccgcctacgacgggcccgctgcccgatacgccgctgatgaagtacggctcgcaggtagccggccagaaccagatcgtgtggagcatcggcgtgaacctggacaacatcgtggacgcgtacgcgaactatgccgtgggcggttccgacccgtcgccgcagcagcgcaacctgttgctgaccgacgacttgcagggcgggcaggccatcacgtcgggcggcgtgacggtgtacatgcccgtggtggccaccaccgacgcgggcgaggcgcagaccgagcagtacgcggcctatcccatcaccgacctgttcgcgctgaccgacaagtcggcggccgacggcatgacgcaggacgagttcgcgagcagcgtgcgcatggcagccgtgcccaccatcggcgtgtgggagaaccgcgtggtgtacatcgggttcggcaacgtgcccacgggcaatgggtcgagcccgctcaatatcggaaacatcctggacggccagggcgaggcgggactttcctggctgctggaagaaaaaggcgccacgcctgctcagaaagccatcatcatgaagtacttcagcgcctcggggccgaacaagggcgacttcacgtcgttcatcgtagagctgcgcagcgacgcgtccgaaaccgggcagtacgagaacaacgccacgctcacctatggcgacagcgggtcggaagcggcgcccggaagcgcgcatttcaccgtgatctcgggcggcgtggaggtgaaggacggcaaggccgttctgaagaaggtggacgcgggcaatccggacgccacgctgccgggcgccgtgttcaggttggagaagatgcagcctgacaacacctgggcgacggttgcgggttccgagcagctgactacggatggaagcgggctgatcacggtgacggggttgctgttgggccagtaccgtttcgtggagatggtgccgcccgtcgggtatgagatgacgagcgagtcggtggaattcgccatcacgtcgactacgctgaaccataccgcgaacgttacggccgagaacaggagggcccccgtgctgggcaaggtcgtgctgacgaaggtggacgcggacgcgccgggtacggtgctgcccggcgccgtgttcaagctggaagagcaggcggcggacgggtcgtgggtcgaagtgccgggatacgagtcgcttgtcaccgatggcagcggcttgatcgaggtggaacgtctcgcgatgggcgcgtaccgcttcgtggagctttcggctcccgagggttacgagctggagacggtgccggtggagttcgcgctggccgaggacgcgcccgggttggaggtggccgtgacggccatgaacaccaagagcccggtgttcgggaaggcggtgctgaagaaggttgacgccgaggctcccgatgccgtgctgccgggcgcgacgttcaagctggagcagcgcctcgccgacgattcctgggagatcgtgccgggccacgatgcgcttgtcaccgacgccggcggcctgatcgaggtgaccgacttggcggtgggcagctaccgcttcgtggaaaccgcggctcccgaaggctacgtgctggacgacacgccccgcgagttcgccatcgacgccgccgcgccggcgcccatcgtcgtgaatctcacggctgcgaacgccaaggagccgcccgcgccgctgggcaaggtcgtgctgacgaaggtggatgccgattcgccgacgacggtgctcccgggcgccgtgttcaagctggagacgcagacggccgacggaagctgggagcccgtgccgggttcccagcgcctgaccacggacgccgacggtctgatcgaggtaaccgatctgccgatgggcgcgtaccgcttcgtggagctttcggctcccgagggttacgagctggagacggtgccggtggagttcacgctggccgaggacgcgcccggccttgcggtggccgtgacggctacgaacgtgaagacccctgtgctgggcggcgcgctgctcacgaaggtggatgccgacgatgcgacgacggtgcttgccggagcggtgttcaagttggagcagcgtctgtccgacgggacgtgggccgtggtcgacggcttcgacgcgctcgccacgaacgatgagggaatcatcgaggtgcatggtttgccggtgggaagctaccgcttcgtagagacggccgcccccgagggctacgtgttggatgagacgccggttgagttcggagtggaagtgggccagcccgagcaggtcgaactcactgtggagaacgctccggtgccgcccgacccggttgacccggtggatcccaacgatcccaccgacccgaccgacccggcgaaacccgtcgaccctgccgcgccgggcaccccatcgacctcgcaaccgtcgactccgaatgccccgggcaagacgtcctctgcatcgtcgatcgcccgcaccggcgacgctgttccgctcgccgttctgggcgcgctgggcgcagtcgcgataggcgcgctcgccacggcgcttttggtggcgcggcggcgtgcgggtcgtcgctagccgttgttggagtagttgtcggcgttctctttgagcttcgccagcaccgcgacgaacgtgtcgagatccgcctggtcgataccctcgatcaggcggtccgccgcgtcgacggtaaccggctgcgcggccatgaccagctcgtgcgccttgtccgtcaccgagatagcgtgcgcgcggcggtcggacttgtgctggttgcgcaccacgagacccttgcgctcgagcgtgtcgaggtagcgggtgatggtggcctgctccttgcgcgtgcgttccgccagttgcttctgcgagagttcgcccgcgctgtccagctggttgatgaggttccattggcccggcgtgatctcgtagggcttgagcgcggtttccagcgacttggcgatggcgcgctgcgcgtcgtacacgaggaatccgatgaggctgttatgctggttgatcatgcttgacctgcttctggcatgccgcgcgaaggtggggaggggcgtgcgggcggtccgcacgctgcgctggccacgctgaacggcgatagggactataaagtacctgctcaattaatcacaattgaccggaacccgtcaacttctttgcgtctcgcgcgtccaaaaaccacgccgccggtatctaagaccgcactcgcgctgcctctgctgatgctgctcgcgtctgcatgtcgttgaagccgtcattaacgtctgtgatcgacggcgatggttgcgcgcaagcaatctcgcacgccgcagggccgtttctgcacaaaaagacgcgacgtgcgacaccttgtcggttgccgcatttcgcgcagttttggttgctttggaaaacgcctgatcgatattgtagcgatcggaggagtatggaaggcttcgtcgacaggacggttggaaagctcttttcgaggcttccaggcgtcgcacgtcgcgtctttttgtgcagaaacggccctgcggcgtgcatcggcgtcgtcccgtgcagcgcccccggtcccggttcggtgcgcatagggttcttggcaggtgcagcaggtagaaaacggcgtacgtctttctttcctgtcgcctctcgcagcatgtttcacgtgaaacatgcgtacgtttttacctgttcgccacgtataactctcgtggtcgcgactattctttataaagatagcttaaagtcgttgcactaataatatcaggtaatataattagcactgcaagtaaaaggggaacgagaacggggaacttgcagtccggggcgctttgaagggggattcttcgacgcgcgcacccctccgcatctccgacccctccatgcagagtgaggcaaaaggaggagagatgtcactaaagatgagccgccgaggcttcgtgaaggcttcggccgtcgcgaccgcttcgacgctgctgctcggcgcgtcggcgaccaccgccgcggccgacgaggcagcggccaccagcacctcgtccgatgacgtgaagatcatccccagcgcgtgccgccagtgctacggccgctgcgcgttgttcgggcacgtcaaggacgggcgcctcgtgaagatcgagggcaaccccgacctgttcagcgagggcacgctgtgcgggcgctgcttcgccatcccgcaggagctgtacaacccgctgcgcgtgcgctacccgcagaagcgcgtgggcgagaagggctccggccagtggaagcgcatcacgtgggaagaggcctacgaggaagcgcgcgaccgcttcaccaagatcggcgaggagcacggttggcacaccatcgcgcaccagtacggcacgggccgcgacatgctgcagttccaggccatcaacaagctgtggcttgagctgggctctacggccacgttcggcgtgggcaacctgtgctgggtgggctcgtacttctccagccagcgtttgtacggcgacgagacgcagtacaccggctgggacggcaacaacaccgactgcatcctcatctggtgccgccaggagcgcagccgcggctactacgactggctcaccgtcaagcgcgcgcaggagcgcggcgcgaaggtcatctgcgtcgacccccgcttcacctgcacggcttccaaggcagacatctggctgcccattcgccccggctccgacatggcgctggtgctggctttcatcaacgagatcgtccactctgacaagtgcgcaaccgaattcgcgcgcatgtacacgaacgccccgttcttcatcgacgagaaggacgccgacggcaacggcacgggctaccagctgcgcgagtcgtacctcaaggaggacggcaacgaggagctgtacgccgcgtgggacgagaacagcgaccagctgatcttctggtccggcgactggcagaacacgaagggcgtgggcggcccgaaggccttccagtggctcgacgccgagggcaacatcgtggccgacgcgaagcccgcgctgtccggcagccatgagatcaacggcaagacctaccgcaccagctgggacatcctggtggagcacgtcaccccgtggaccatccagcgcgccgccgagttctgcgagcttcccgaggacaagatcaaggaagccatcgacgcctacatcgacgccagcccgcacgcgtgcttcacgcgcggccagaaggtggagttctccatcaacacgtccggcatctcgcaggcgttcaccatcatgatggcgctggccggcaacttcgactcgaagggcggccagaacatcggccgcgagcccgccaccggctacgactccttcatgttcgacgtcgtgccgaaccagaagggccgcatggggcagcgccgcaaggaaacggccatgaacatcaagaagctgtccgtgtgccagaacaccggctaccaggacatcctcgtggccgacgacgccaccggcgagctgaagaccacgaagcagaactccggcggccaggtcatctacggccagcagggcggcttcggcgcggccacgacgaaggccatggcgaagggcgatccgttccagatctacgggtactggcagcagacgtccgagcccatcctctccatcgagggcggccacgagatcgtcgaaggcttcaagaacctggacttcttcgtgaacgtggacctgtacatgacgccgtcgggcgagctggccgacatcatcctgccggccgcgcatcccaacgaagtggaccgcgtcgagtgggcgcactccggccacggctatccgaccagccacacctacctcatccgccagccgttccacgagccgctgggcgagtgccgcgacgacatggacatctgcttcgagttcgcgaagtacatggatgtggatatgtactggaaggacaagtacgagttcttcgactacatggtgaagggccccgagacgcttccgcccgatctgagctgcgcgagcttcgaggagttccgcgagcgcatcagcgtgaccggtgtggagatggccaccgtgaagaacgcgccgaagtacgagacgggcttcatgcgcaagacgagcgacttccgccccggcttcaacaccatgtaccgcggcaacaagatgggctcggtctaccgcttccccggcgcgcaaacgccggacggcaaggtgatcccgccgcatccgcagtccgacaacggcaagatggagctgtggagcgaagacctgctgctgtacggaaacggcgctctgcccatgtacatcgagccgcccatcacgaagatctcgcgccccgatctgctggacgagtacccgtacacgctgatcacgggcggccgcagccacgcgttcttccacaccgagtaccgcaacagtccgtggatgcgcgaggtgcacatgttcccgacgatggacatcaaccccgccgccgccgccgagcacggcatcgagcaggacgactgggtgtacatcgagacgtacgtcgaccgcatcaagcagcgcgcgaacctcaccgaggccatcaagccgggcatgatccacgtcgagcacgactggtggttccccgagcgcgaggccaccgacgacctgcacggcgcgttcgacagcaactgcaacgtgctgttcgagaacaacggcccgtacgatcccgcggtgggcaccgacaactacggcggcctgtgcaaggtgtacaaggccgacgacggcgcgccgaagaacatctgcatgaactcggaagacctcaagatattcctgccgctgaccgccgaccagctggccgccgacgaccagcagaacggcgtcacgcaggtgacgaaggggggtgcgaagtaacatgacccgcaacattatcgacatcgacctggacagctgcatcggctgccactcctgcgccgtcgtgtgcaagcaggagaacaacgtggggctgggcacgttctacaacaaggtgctgacggtgggctcttcgggaacctatcccgacctggagatgtactacctgcccgtgtcgtgccagcattgcgacaacccggaatgcgtcagcgtgtgccccaccggtgccagctacaagcgcgacgacggcgtggtgctggtggatcacagcaagtgcatcggctgccagtactgcgtcatggcctgcccctacggcgtgcgcgcgtacgacaccggcaaggacaagggcgttatcgaaaagtgcacgatgtgcgcgcacctcatcgacaagggcgagaagccggcgtgcgtgaagcactgcccgggccaggcccgcaagttcggcgacctggacgacccccagtccgatgtgtcgaagctgcgcgccgcaaagaagacgtacaagctgaaggacgtggggaaccatccgggcgtggactacgccatggacaagtgcgcctggaagggagatgagtaaccatggaaatccagtggccacttctgattttcagcgtgctgttgggtgtcacctcgggctcgttcgtgttcctggccgtgggcgagctgcgcggcaagttccgcgaagtgcggttctcgggcgcgctgatcgcgctcatctgcctggccgtgggcggctgcgtgtcggtgctgcacatggggcacccggagcgcgcgacgcatttgctgggcaacctgggatccgggctgtcgaaggagctgttcgtcgtcgccatcatgggcatcatcgcgttggtgtacctggtgctggcgaagaaggactaccctggcgtgtcgaaggtgttcggcgtgctgggaggcatcgtgggcctggtgctgccgttcgtggcagggtcgtcgtacctgatcgcggcccgtcctgcgtgggatagcatcgcgcttcccctgatgttcttgggcgccggcctggctttgggcatgacgctgatggccggcctcgtgctgctgcgcggcaaggccgccgaagagggcggcttcgcgctgaagctggcgctggcgggcgtcgtcatcatggcggtgaccacggtggcgtacgtggtgtggatcgccatcgctccgtaccaggcgccgacgcgttccatcgatcgtctgatctcgggcgatttggccgtgatgttctgggcgggcgtcgtggtgatcggcatcgtggtcccggttgcgctgaccgtgctggcctgcgtgcaggcgacgaagggagcgggcgacaccggttcggtcgcgccgaagcagctggccatgtacctgctcggagcgtgcgcctgcaccgccatcggcgccgtggtgatccgcatcatcatgtacgccgtgggcaccagcgtggagcagttcatctaccactgatacggttgggggcgcgcggcctggtgcggcgcgtccccctcatccgccttcccccgtgcctgaacgctgcaaccccccccccgcagcgttcaggtgcgaaggacggccgacgagatcagacatcaaaacccaaggagggtaatcatgatcgaaaccatgcctgctgagctcgctgagaaccttatcgacttctgcgagaaccgcgaccgcgtgtacgcgctgctgtcgcgctgctacgagaccgagatcgacgccgcgttcgccgaggcgctggcgggggaggccgcgctggcctccgacgacgccggcctggccgccgggttcgccgcgctccaggccgacctcgccgactgcgacgaggatgcgctcgagcagctggcggtcgtcttcgaccgcgcgttcttcggcatgggcccgcgcaccgctcagaaggccttcccgtacgagtcggtgtatacgagcgagggcggcctcatgatgcaggaggcctacgcggaggtgctgcacgtgtaccgcggcgcgggcttcgcgaagaaccccggcttcaaggagccggaggaccacctggccgtggagctggccttcatggcgcttctgtgcgggcgcgccgtggaggcgctgcgcgcgggagacgaggcgggggccgagcgccagctgcgcgcccagagggagttcctgagcgaccacctgctgaactggatcgaccgtttcacggccgacgtgcgcaaggctgccgaagacggcttctacttcgacttggcgacgttcaccgaaggcttcctgaccgccgacgcggccgagcttgccgaagtgctggggtagcagcatgcgatcgtggcacaaattttcggtttgggcatggtggaaggcgggcgggaaacagcgaccaggcattacgtaaatgcatggtttgctattcgccaaaaagtagaaggaatttgcgcccaaaccgtgtatttgtgccagattcggccgacctgaccgacggccgaagcgtttcacgtgaaacatcgagtttgttgttgaggggatgataagtgtggagacgatttcccgacgcgggttcctcgccgcgggggccgtgggcgcggcgatggtgggcgtcggcgggttcggcgcggtgtcgcgccaggccgacgccgcgttcgtgcgcccgccgggcgcggagtcgaacgcgcagctggtggcggcgtgcgaccgctgcgggcgctgcctgcaggcgtgtccctacggcatcgtgacgccggttccgctggccgagaacctggtggcctacggcacgccgacgctcgccttcgatcacgggtgctgcgacttctgcatgcagtgcgttgacgcgtgccccaccggcgcgctcgcctacggcggcccgcgcgagcgcgacctgggcgttgccgtggtggtgaaggacgcgtgcgtggcctgggactgggccggctgcaccgtgtgtaaggacgagtgcccggtggagggcgccatcacgctggacgaccacgaccggccggtcgtgcatcccgagtactgcgacggctgcggcaagtgcgagcaggtgtgcccctcggcctcgctgcgcgcctacgatgcgagcgtcgaggacaagggcatcgtggtggtgtcgcgctcgagcgaggcggcgcaggcgacgggcgccgtgtccagcgaggagctggcgtccaagcgcacggtggccgtggcgcaggcgaacgcggcgagcccccacaccaagggcgtccaccccgacggccccgacgcgacgcgagaggcgggagcctgacatgaagacgcgcatcaaaaccatccgcatcctcgtggcgaccgccgtgctggcgctggccgtcgtcgcggcgcatctcggcggcaatgccgccatcggcaccctgtgcgcgctgtgccccgtgggcttcgcgcagatcgccgtcgcctcgggcagcgtgccgtggggcctcatgcccggcgtgctggccgtgctggtcatcgtgttcttgctgggtcgggcgttctgctcgtggctctgcccttcgcagcttctgaagaacgtgttcggcggccacaccccgcgcggcattctcggccgcagcggcgaggcggtacccgtcttccgcggcggttcggcggcgagcgatccgtccgagcctcctgcatcggttggaaaatcctccggctccggctgctccacctgctcgtcctgtgggacctccagtctcaaaacccagggcctcgtcctggtcgtgctgctggttgtgtctttcgctgtggggttcccggtgttctgcctgctgtgccccatcggtctcgtgttcggcacgctgtgggccctcaaccgcgtgttcgttctgctgcagccgggctgggagctgatcgtcttcccgctcatgctgctggcggagctgttcctgttcaagcgttggtgctcgtccatctgcccgctcggcttcttcttcgggctcatgggcaagctgcgcgcgaagctcggcttcggcgcccgccctcaggccgactgcgccacctgcatctcgaaggagggctgccgaacctgttccaccgtgtgccccgagggcatcgacgtggcggatcccggcaaggcgacgctggaggcctgcaccttctgcctcgactgcgtggagaactgccccacgaagtccatcaaggtcaaggcgggggccgggaagccgatacccggctctttcgacgagctttccgacgttgaggaggtcgaaccgtccgtcagatagcgcacgagtccgatctcgtttccgtcttggcaagtcgggcttccgctatcatgagtgcgagccatgatagcggtgtcgaagggacggcgtatgaagttcaccatagtggcggtgggaaagctgaaggaaaagttctggacggctgcgtgcgccgagtacctgaagcgcatgcagccgtacggtaagaccgaggtgcgcgagatcgccgacgtcgatcctgcgcgcgcgggcggcgtggatgcagcgcgcgaccgcgagggcgccgccatcttggccgcgctcgggccctcggcgcatgtggtgctgctggccatcgacggcaagcagcgttcgagcgagagcttctcgcagcgcatcgacgcgctcaagctgaacggcgcgagcgatatcgcgttcgtcatcggcggctccgacggcgtgagcgccgcggtgcgtcagcgtgccgacgagacgctgtcgttcggccctatcacgctgccgcacaacctggctcgtgtggtgctgctggaacagctctaccgcgcccagaaaatttcacgcggcgagccataccataaatgagacaaagggacgggttaatgtctcgtcgtcgcgagagcgcccgtcccctttgtcccccgaatgagacatcaaccccattcctttgcctcattttgcctcatgagtgcgaagagcgcggtggccagcgctgccgttgccagggcggcaagctcgagcgcattcgcgtggtcgccggtaggcgcgagcttgcttgggctgtcgggctggtcgtcggctggttgcgggagcggttgcggttgaatgccgggatcggcggggtcatcgcctgggtttgcaggagttttgtcaagttgcgtcgttaccacgtatcgggcgcgcttggattcgtcgacctcgccgccttcggttgcgccgccgtattccgttgcgacgggcgaccccttcggcccgtttgccgccgcaacgctcattcccacgtcgagccagcgtccgtcgtcgagccatgcgcccaagccggtggatgctgtagtaagcacggagagcggttgcaggttcgcatcgcagaacagaacgtcgctgcgggagatgggcggtttcgtcatgtcgatgcgccgcgacagcgccacggtgccgtggcgagcgacccgaagttgcatgtatacgtcggatccgtccacctcgataggagatcgtgcccgttccgctcccgtgctgtcgaactcgatcagcaggttcgtcagcttcgcgggatccaagtagtccgaagaaagcagcgcgtagaagccgtccttcgcgcgctcgacggccagcagcatgcggctggcgcgcagaggcagcgtggccgcggcgcgctcgggcgtgcacagctcgccattgtcggaggcatgctcgagaagggttgcgccatcgcgcagcgccgcgacgatggcgtcggcgggcaggatgcgcgcttcctccgtcaaagcgcctgcgtcatccatgaacccgaaggcgaacgcgtcggcgtcgacgggaaccacggtttcggcctgggtccatccgtagcgcgcttccacggttccgtcttcaagcggggtgagcgcggcgatcgttcggccgccgcctggatagaaagacgccgctaatacggtggacccgctgcctgcaagcgagagggaagcggcttggtcgaagggataggacgcgataacggttccgcgctggagatcgatccagtatcccgcgctttcgcctcccgctgcaggcatgagcacgaacgcggtctcgttcgatagcggcacgacgcgaagcgaaggacggtagtccaagacggcgggaacgggaacgccctcgaccgtgcgcgaggatacgcgtgcgacatcggcggggtcgatggcgtgcagcttgagctggccgtcggctatctggaagaaccgtttgcttccgtcggggcaggcgaacacgttgctgagcaccgtggaatcttcggtgtactcggtgcccaggtagccgcccgcgcagtcgacgggggtgagcagcgggcttgctttcagctcgaggcgcacttcgggagaatatgcagtcgtgccgcctgtttgagccaagacgaacatgccggcagggaacacgatctcgcacgttgacgaaggcccgatatcgccggcatcgagaaagtacggaaggctgaccgtggtgccgtccgtctcgatgttcagcagggcgtggggctggccgtccacgatgagctgcgttgccgcgggcagcggcgtggcgagggcaggcttcgtggacgcttcgaacgacagcgtccccgtgttcgagacgctgtcgaacaggggcgtaagcgtgaaatcgtcgggcggttccggcttgccggcgttcgagtacgagatgttcagcgtgccgccatccgcacggctttcggtgacggcgatggtcaggccggtgaatccgacgttggcgttttcgaaaaagttggttgaagggtaacctcggggagacacctcgtcgcctgcgtacagcatgcagccgtattctctcgagccgattgcggctgggacgaggtcggtgctttccgcgtgcggctcgttcatatcagggtcgaccagctcgatcagctggttgtgcacggttccgtacgtgttcgaatgaacgaaatacggtccgcccgatcctaggtcggcctgaactctgaagaggcgaaatcccgacggaagctcggcgggttggccatcttgctcgtagcgaacgctttggttgccggcgaagcggtcgtactgcagcaggtagtaggacgagaacatgcttgcgtcttggttcgccaccacgacgataccgccggtttcatcgatgtcgttcgaagcgaacgcttctaaagccgcttctacggacgagctgccgtcggcggttgcgtccacgtgttgcaccaccttgccgtcgcgtttgacgtcgatgcccgtctcgttcgcgaagatgcgggtgatcttgctgtcgggcagccagcccagcatccatttcgagaatccattgtgatcgccctggttctgcatcatgatgtcgaaggtgaggattcccgtgcggtcggcggagcctccttgctggctggcgtactggtagtagtcgggcaggcccagcacgtgacccgtttcgtggatgatggtctgcgcggcccacggttggtcgcacggattcgacagcgccacggcgttccataggcgcactgtgccgtcagcgtacacggcgtcggggacgtcgagcacctgctcgttgctccaccagacgctgccccagccggtgtcgccgccggcgaagtgcaggtagacggcatcgatgcgcccgtcgccgttcgcgtcgaatcgcgcgagatcgatgccggatgcctcgaggtggtcgagcgcctccttgtacagttgcccgatgttcgccgtgtagaaatcgcgctcgtgctgggccgcgtagtcgaacgcttcgccggtgacggtaagcgcgccgtacgacgcgcggaggtagtagtcgtgcaggttctcgtagggaaagccgccggcgctcggcagcgcggcctcgccgacggcgcgcgggcctatgagcgcctgaagcgcttccagcgtatctccttccgcgaaggggcggtcggggaacgacacgcgcagcgccaccacgtgtgcgttgccgatagcggccatgccgccgtcgtcgccgggaaccgcgttcggggcgatgccgttttgcgcctgctcgcgcgcgagagcctgttggacgaggccgggggagggctcgtcgttgccgaggctttcctggaaggcttctcgttcgtccagcgtgccgtctgcggcataggcggcgcgttgctcgacggtggcgatgcagggcgagtgcgccgcgtcctgcgcatgggccgacgcgggcgcgagcgcacctgcgaaggctgctgccagaagcgcggtcagccaaaacgcggcccaacgcgcggcctttgagcgagcgaagcgttgcatgcggttcccttcgtcttccggtgtgatggaaccatactacccgctgccgccccgctcgacacgtgctttttgagaatgaggcaaaggggaggggttaacgtctcgtttggggatatgggggacgggcgctctcgcgacgacgagacgtcaacccctcccctttgcctcattccgcccgtcatccgtgttggtgatctgcgcggtataatgaccgagtcgttggcgaatcgggaaaggaactatatgcgcttcgtctcgtggaacgtgaacggcttgcgcgccgtgctgaaaaaaggcttcgaagacatcgtgtgcgagctggacgccgacatcgttgccttgcaggaaacgaagctgcaagagggccaggccacgctcgacctgccgcagtaccgcgagtactggagctatgccgagaagaagggttactccggcacggctatattctgcaaagagcagccgctgcaggcgctgcacggcctgggcttcccgcacctggataccgaggggcgcatcgtggcgctggagttcccgaaattctggttcgtggacgtgtacacgccgaacgcgcagaacgagctggcgcgcatcgaccatcgcatggagtgggacgacgcgttccgcgacttctgcaagggactcgaagaaggcgtgctgcccgccggcgtgccggtggagcggccggcgttgggcgaggggcacgtggccatttccgagctcccgctgacgcagccgggcgagacggccgacccgaagcccgtcgtcatgtgcggcgacttcaacgtggctcaccaggagatcgatctcaaaaacccgggcccgaaccgcggcaaggccggtttctcggacgaggagcgcggcaagttcaccgacttgctggaggtcgggttcgtcgactcgttccgccacctgcatcctgacgtgacgggcgcgtactcgtggtggagctaccgcttcaaagcgcgccagacgaacgcggggtggcgcatcgactacttcctggtcagcgacgagttggctccgaagatccaaagcgcctgcatctacgacgaagtctacggcagcgaccactgccccgtggggatagagctggagctgtaggatcgcttgcagctcgaatgctccgtctggggcgttcgagctgcggccggtgacgccgaaaatgcttccgtatggtaaaagcgggggagtttggtaatcctatgaaaaccgtgggatatctctcggctcttcttcacctggggatatgcaggatgctgcgttcggtccttggaaattcgggtcggaaggcaggcgggagattaccaaaccgccccgtttctgccgccgagcttcgatttctccgtcatcctccgccccgcccccgctccccccccgtccccccgccccgccccgccccctcttcccccgcttcccgttctccgttttccaagaagctgactgtccgaaggatccttgtctctcgaggcggcggggagcttgccgatcttgacgtcgcgaatgacggggcgcgcggcaagcggttctgcaacggcgttcgcagacgccgcgtcatctagagttcctgtggcgtgtgccgcagcggaaagagcgctcatggtatgatgcttctcgttgtatgacggcagaaagacggttatggatagagcgaaaatcgaagagggcgtgcggctgatcctcgaaggcgtgggcgaggatcccggccgcgagggcctggtcaaaactcccgagcgcgtggcgaagatgtacgaggaggtgttcgcgggcctcaccgaggatccggcgcagcatttcgaaaccacgttcgacgagcaccacgaggaaatggttctcgtgcgcgacatccccttctattccatgtgcgagcatcatctcgcgccgtttttcggcgtggcgcatgtggcgtacattccggcatccgatggacgcatctgcggattgtcgaagctcgcgcgcctggtggatgctttcgcgaaacgaccgcaagtgcaggaacgtctgacctcgcaaatcgccgacacgctgatcgaacagctgcacccgcagggcgtgatcgtggttttggaggccgagcacatgtgcatgagcatgcgcggtgtgaagaagcccggcacgaccaccaccaccagcgccgtgcgcggcgccttcgagaaaagccaggcgacgcgcgccgaggcactgtcgctcatcttcgcgcgacggaactagggcgcccccccgaaagggccatcgcgaatgtttcacgtgaaacattcgttcgcaatcaggtagcgcagcaggcaaggaaaggaaccagccaatgaagtgtgtagtctccgttctgggcaaggaccgcagcggcatcgtcgcggaggttgccaccgcgcttgccgagtgcggcgcgaacatcgacgacatcagccagaccatcctggacgacatcttctcgatgaccatgctgaccacgctcaatcccgaggtggccgacttcaacacggtgcaggagaagctggaagctgtgggcgaatccctgggtgtccaaatcatcgtccagcgcgaagacgtcttccagatgatgtacaagatctaacgtcctaaaaggggcaattcccatctggggcgttttcgtgggcatcggctagggctctatagcgaaaggcggcctttggatgttagggatggagcgaggcgggcggttctaccggctgttcgacgcgctttttggtgcacgcgaacgcgatgttcaacttgacggtcgaagatgcttcgacgctacggatgtcctaaaagggaacagattccttttaggacattttcgtgaaggtcaagcggtgaacagatcgattatctcctgcttggagtgtacgcccagcttcgcgtagatgttcttgatatgtcctcgcacggtgttgggagacaggtacagagcctcgccgatataggtggagctcctgccgcgagccagcagcaggaggatttccgattcgcggtccgtcaggccatgccgaaccgtcacttcggtgcctttggcgtcgaatgcgtcttcgcctcggacgggctcgccggacgcggccggccgttgctcgcgttccgagcgcttcctgatgcgcagcatgaatagcaggacgatggaaagcaggtacaacgcgatgcagaacaccagcatcgtcttgaacgacgggttgagatcgagccccgcgataaccgtgccgcctacgatccccgacaccgatgcaagcctgatcagcagcaccgacgcacccatgaacgcatacgggttcaaatcgctttcgtgcgcttcgcgaatgatgaggtacatcacgctggtggagatcaggctgtggccggcgacgaacgccgcgcccacgaagtagctgtactggaagttcgcgaacggccaaatgatcagcacgccggtgagcagggggaagagcgcgcgataggcgcgggaggcgctgaacgtcttcggaaagccgtacgccatgacgaagaacgccatcgaggctgcggcgatgcccatcgccgatgccaaagacgagccgtcgaagtcgtagtgctgcaccaccatgaatccgttgatgatgcccacgacgcatccgagcaccagcagcgacagcaggccttccccgatggacacgaatccccgaaggtacggtcgcagggaggttcgatccctcttctgctccgcacccgccgccgcctcgtcgcctcccatcgtcttgccgctggcaagcgcgttgcccgctatgcctttcgcgcgtcgatagagcagtgcgctcgccactagcgtcgcaacgacgcagggaagcatgaccagcgaagggctgttctgcaaggccaaagtgaccgcggcggccagcagcatcgacgaggccagcgtcttcatgctgatggtgggctccatttccgtcatgatttctacccaagccaacgtgagcatgaccgtggcggttccctgcgcgaaagcaagcgccatcagcgagactactggatcgacggacgagagagcgccgctgtacgacaacaccgcggtggccgccagcaccaacgagggcgcgatcactggcatggatagcctgggcagccgaccaagcagggccagcgcgacgatgaccgcttccgtgaggacgacgaaagccgccgacgcgatgctgaagtccaatcccgctatgaggacggtggtcgtttccgacgtcagcatggccgtggagtatagggacgactgggcgactttgaacgaggcgaatccaagcgcgcagcacgcgacgaacagacggcgcttgtcgaagcgcgaaacatccatcggccgacccctcccctcgatacgtcgccgaatctgcgctcattgtccgatagtatcgtctctctgccaacccctgttcgtgcaaaaaagccctgttggaggcaattcaacccaaaatgagggaggggtcgagtcgccgattcgacccagaatgggagatgcgtcgcgcctgttctccggcctatgctgagcgggtcgtcaagtagggcgggaagagctccgacgacaaggatagcaatcgaaactgaacggtcgccaggggagggcattgtgcccgcaggagcggcggttcggcccgagcaacaggagggatgtcatgaacgaaggaatttcacggcgcaacttcatcggcggtgcggcgctgggcggcgcagcgctcgcattgggcgcgcttgcgggctgcgctccgcaaggcgacaagcccacgggttccgagggcacctgggatgccgaggtcgacctgctggtgtgcggctgcggcggcgccggcatggcgtgcgcggtcgaagccaaggacaatggcgtggagaacgtgctgatcatcgaaaagggtgaccagatcggcggcactacggccatgtcccagggcatgatcgccggttgggatacccagctgcagaagtcgcagggcgtcgagctcacctacgacgcgatgtatgcgaacctgatgaacaacgcgtcgtatcatcttgacccggcgctcactaagatcacggtggagaacagcggcaagaccatcgactggctgatcgaccgcgtgggcgtcaagttcacggatcagatcgacatctactacggccccctgcaaatgatgcataacgtcgacggcgcgggcggcggtttcgtcgcggctttcaccgcctgcctggaccagctgggcgtggagatccagaagggcacgaagctggtggaggttctgctggacgccgagggcaagacggaaggcgcggtggtcgaggcgaagggaaagacgcagcgtatcaaggcgcgcgctatcatgatcgccaccggcggctacgcctacaacgccgagctggcggcgcgcttcgatcccgagaaggcgggtacgttcggcatcgggcacccgaattgcgagggcgagggcctggtggccgcttcgaacgcaggcgcgctcctgtcgcacaccaacgacatgatgtgcgtggtgaaggactacaccatcatgagcgagcacaacggcacctcggccagcgctaacctcaacggtttcacgaaccttcccaacatgatcttggtgggcgccgacggcaagcgcttcgtcgacgagggcaaaaaaggcttcatgagccagaacctgaacggccccattttcgacaagatccatcgcgacggcatgggctacgtatgggagatctccgacgaggccacggtggcagcagccggcggcaaagtgaagcgcggcgaaggactcgaatacatcaagggtgccgatgcgactgagctcgcggccaacatgggcgtggatgccgcagcgcttgccgagaccatcgaggcctacaacgctgcggtggactcgggcgtggaccgcgagatcggcggcttccccacggccaagctggaggctcctttcctggccgtgcccgtcgtgccgtgcgagatcatcacgtacggcggcgtggctcgcaccgagcagggcgaggtcatccgtgctgatggcgaagtgatgccgggcctgttcgtgggcggcgaggctagctgcaactccgcctacatgggattcacgctttccaactgcttcacgtggggtcgcatcggcgcccagagcgcggcggcgtacctgaaagcctagaccctttcctccttcatcccctccctgatgcgggtgcggcgcaagcgcgttgcacccgcatttttttcgcgtgcgcagcgttgcctcgctttcggccgaaacctgccagaaacggcaagccttttcgcacgggcgccgtcgaacgcacgcagcaaagcgcgtcgacccgatccagcgggacccggtcgacgcgcttcgggaggaggggtgcgtacgggttagttgagcttgccagaacctagatccttgcccaaaacgtagggcagcgtaatgcaggtggctccgtagttcatgccttccatcgcgaacgtgtaggtgccggagtagaagttgccgatcatgcatccggcgttgaacaggccttcgatcggctggtcgttctcgtcgagcacccgaagatcgctgtcggtgcgcaggccgcccagagaagtcaggaagccgggagagaaggatgcgccgtagaagggaccgtcgtctgccccaatggagatgagcttgtcggcggtcttgtagaaatcagtgtccacgcctgcttcgcacatcttgttgtagcgctcgacggtgtcgatagtcgccgccggcaagccgagcttcgagatgacctcttcgcgcgtgtctgccttgacgatgccgaagccgtcggcatccgtatcccagcgttcgataacctcttccgtcgtgaagtattcgccgtgagggtagttgatggcgccccagggcccacctgcttcggcgcgattagcgccccagatgcaataggcggtcttctcggacaaatgcatgatggtcgcgcaggcgaggcctcccaacgcgtcctcgttcatgaagcgctgtcccatgttgtccaccatgaggccggtgtggctcgtgtaaggttggtcgccgggaaggttggggcggccgagcatgatgttgttgggctccttttgccaggcgccgcccacccaaagctccattttgtggccgtctccgggcatgagcccgcccatccaaatgccctgatcgtagttgatgtcggttgtgaaatcgcacagctcgacggcctgggggcaatagcgctccatcatatccttgtcatgggagaagtcgccggttgccatgatgacggctttggtgccgacgtatttggtgtaggcgccgtcggcatcggacgcgatgatcgcgtccacgcgaccttccttgccgttggcaacgccgccgcgaaccagctgctcgcctttgacgttccagcgcacgtctactcccaggtctttggtcacgtacctccccatctccgcagcgatatgcccttcgccgtttccgatggagcctttcagctcgctgtcgtcaacgtagaacgcgtgagctgcgggcggggtgaacatcgggtcgccttctttgtattccggacccgactcgatggtggtcttgatgccggccttggccgcgatgtcgatgatccagttgatggcctcctcggagttgttgtagaacttgtaccacagagccggtttgaagttgccgccgttggcgaggtactccttgcggtagaaccacgtgggatccatgcgggggatgcccatctcttccatgaccttcgaatacacgccgttgttggatccgccgcggctcacaggagccttcgacgcgctgatgagcgtcaccttcaatccgttttcagcgcatgatgcagctgcgaccagaccgctcatgccgcctcccaccaccacgacatcggtttcaaccgtttcggtgacgaggtcgtcgccgataggatcgggcgcgatctcgaagctccaccgctgttcggcgttgttcgcgcccgtcgtttgggcggagtcggacttgctttcggatgttcctgctgcgggcgagcatgcggccagcgcgcctcccgcaatgaggcctgcagcgctcaatgccgcccctttgacgaagctgcgacggttcagatttccctccatgatgaactccctttcctagcttatctcaccaaggcgctgcttgccttgcgggcgctgtttgcgccttggactgatcgcagcctaatcgatcagggaaaacaaggcctcacccagcctaggtggtttttcgtccagaaggtcggacgtcgcgagcgtccgctaaggaggtcgaggggtgcggtacaatgggcgcgcggacagctggcgcggaagttcgagcgcatgctgttcgcgcgcggaggggaggtgcggatccatgagattcattctgaaaaacatgaagcgagagcaggtgctggccgcgctcgcctacgggttcttcctggcgtgcacctcggtgacgctgtggggagggtatgtgcggtttctgaccgggcaggtggatccgggctctttcatgctcgagtatttcgtgcgaagcgcgaccctgcctctctcgcttgcggtttccggcttggccgccttctattggccgaaggctcggctgtggcgttctccgatactggcgctggggttttttcttgcgggttcgctgctggttgccttgcagcatggcggcgtggtttcgtccgagtggtcgcttgtcgtggtgggcgcgtgcttcggatggggaagcgggatcatgttcggcgccttgcaggaaatcgtggctgcgcaaaaggtgttcacggccggtatcgtcgtgtttgccgccgctgggatttcggcgttgctgtttttcgctgttgaggttttgcccgccgatgcagtaccgtggatgtcgctgttcgtgttcgtcggcgcggcggtggcgctaacctgtgctgcatggaaatgcgctccgaaggtgcatcccatgttcgacacggttcccgatcagcggcgcgatcggtgccgcgaagcggtttccgagttgtggcgccctttgctctgcgtcgctttctccgcgttcattgtgggtatcgtgcgcgtcggttcggcttcgggtggcgggtcgatagggcaaacgaatgaaagcaacatgatcgggctgcttgccgcttcggtcgcgctgctggcaacttggaggttcttgtacgagcgcgttacgctcatgcgtttgtatcagattctgtttccgcttacggcgacggcgtttctgctgttgccgcttcttgagggaacgtttcgccaggtggtgtactccctcgtgttcctggtgttttcggtcacgtcttcgctcatggtagtgtcgtgcgctcggacggcgcgcaaccaatcgctcactcccgtgctcgtgtacggcaccttcgccagcatcgtgtatgcaagctcgctggcgggttccgtcgtgggcttgttcgtgggcgcgggtcgaggcgttgggctggcggagctgtccgtggtggcattggtggcggtgtacgcgctgtcggtagcgatggtggcgccgcatgggaggaaggcgggtagcgtgaaagccgcttcgggagagaagctggctcctgtagtcggagctgtaggcgattccgtgactgcaggctgcgcggttgctgtcgagcgttacggtctgtcgcgtcgcgaggccgaggttctcgacctccttgcccgtggccgcgatgtgccgtatgtggccgaagagctggtcatatcgaagaacaccgtgcggacccacacgaagagcattttcgcaaaaacaggggttcattcgcgccaggagcttatcgacttggtggagtccatcgaagcgtgagcacgttcctgccgaacgcgaactttgcatcgcgaaaggtcctgcgcgccccattagccatatgtcccgcagcgcagaggaatgcttcacgtgaaacattcttgcattggatttcccctgtcgaaaatactagtttttaatatagtattttatgcaaattgcaaatcgtataaaatactatacaagaatatagtattaacgatagcacggaggcgacgatgttcaacttgacggtcgaagatgcttccaagcgccttggcgtggggcgcgcacgcgtcaaccagctcatccgcagcggcatgctggctgccgagaaagtgggcgggatatggctcatcgacgagcagagcgtggaagcgcgtcgcaacgccgctccgaaggcggggcgtcctcctgcaagttccagcaaaggggatgtggggcgctacgtgctgatgaatcgcacgcacgaggtgctttcgtttcgctacgatgaggcggccggtgcgttcgtcgacgcaggggacatcgtcgatcctgcgcgagccccgctgggcatgatctccccccgaggtcgaaaagtctcgaaagacgcgctgtcgttctggtggaagcatcgctgcatccccggaactagagaaggcatcgacgcgaagctggccgagctgggcgtcgattcacctgcgaggattcccttcaagagccttgggctgtctttgtcggatcagtattggattcgtcccgaaaactgtgaaatcgcctgggaggacgtgaactatttcgacaacgatttctgcgagatgcgaagcggcagaggctggctcgacggggtggggctcgactccccggacaacacctcggaaggcgaactcccgaaaaaatgggtatgcgacggtgcgaagcgcttgctggtgaagggcggatcggttctcaaccaggagccgttcaacgaggcggcagcgagcgctctatactcacggctgcttgccccggacgagtatgtgaaatatcgcttggagagccgggcgggcggtgccgtctgcatctgcgaaaatttcgtcggctccaccgaagagtacatcccgtcctactatgttcgccagactatgcgtcagccgaaccatcgcaacgattaccaacactacctggaatgctgctcggcgcttgatgcggagcacgtcgagatcgcgttgtccaagatgatcgtgtgcgacgacatcttgggaaactccgatcggcattggcgaaacttcgggcttgtgcgagacgtggaaacgctgcgctaccgtatcgcgccgctgttcgatacgggcggcagcctctggtgctcgtcgacgctcgaaagcctgcgagcgcacgatttctcgttcacgaccaagccgttctacgaagacgccaaccgtcagcttcggttggtgaacgactactcgtggttcgatccggctgcgctcgaagggtttgcagacgagctttcggccatcctttcggacaatcccgcgttggccgagcgcgtggactatatctgctgcgccgtccaaaaacgcatcgatcgcattgtaaggatgctgtagtcggcggggccgtgaggggcgtttcacgtgaagcatttgtacgatggcctctttccggcgcatcttcgctccaaaaacacgcctcagcgccgggagcgtgttttccgagcgaagatgctcctccgaactgtcaaattgtgcctttaatgagaattaatatcaattagtattccatttcgaaacggattgccgtatcgtagcccccatcaaacagaacgccgccaatgcggctaaagggaaaggctcgataccatggccgaccgaatcgacaccacaaggctcacgaacgaggtgggcaaccccgtcgccgacaacaaccatacgctgaccgcgggcgagcgcggccccatgatgctccaggacaactggatgatcgagaagctggcgcacttcgaccgcgaggtcatccccgagcgacgcatgcacgcgaagggttcgggcgcgtacggcaccttcaaggtgaccggcgatatcagcaagtacacgaaggcgaaggtgtttcagccgggcgccgagaccgaggtgttcgtccgcttctccaccgtggcgggcgagcgcggcgcggctgacgccgagcgagacatccgcggcttcgccatgaagttctacacgcccgacggcaactgggacctcgtgggcaacaacacgcccgtcttcttcctgcgcgatcccaagaagttcatcgacctcaaccacgtggtgaagcgcgatccgcacaccaacatgcactcggcgcagagcaactgggacttctggtccagcttgcccgaggcgctgcaccaggtgaccatcgtcatgtccgaccgcggcatcccggccagttaccggcacatgcacggcttcggcagccacacgttcagcctgataaacgaggacaacgagcgcgtgtgggtgaagttccacctcaagaccaaccagggcatcaagaacctcaccgacgccgaggccggccagatcatcgcgggcgaccgcgagagccaccagcgcgacctgttcaacgccatcgagcgcggcgagttccccagctggctcttctgcgtccagatcatggacgaggccacggcgaagaactacaaggagaacccgttcgacatcacgaagacgtggagccagaaggagtttccgctgatcgaggtgggcacgcttgagctgaaccgcaaccccgagaactacttcgccgaggtggagcaggccgcgttcgcgccgacgcacctcgtgccgggcatcgggctgtcgcccgacaagctgctgcagggccgcctgttcgcgtacggcgacgcgcagcgctaccgcctgggcgtgaaccacaatcacatcccggtgaaccggccgcgctgcccctatgccgagttccatcgcgacggtatgatgcgcaccgacggcaacttcggcggcaccatcggctacgagccgaacagctacgggcagtggcagcagcaggccgacgcggccgagccgccgctggacctgttcggaccgatggacgcgtgggatcccgccgacgaccccaccgacgacacgttctaccagccgggcgacctgtatcgtctgatgggcgaggatcagcgcgctgccctcatcgacaacacggcgcgcaacatggacggcgtgaccgagaacatccgcctgcgccatgcggcgcactgctacaaggccgatcccgagtacggcgatcgtttggccgcagcgctggtcgtggacgttgagcgcgtgcacgaactggccgcgatgactcacgaagagcgcatggccgccaccggccagcaggttcccgcccgcaagatcggcggcgaggtgcgcgcctagcgctacgcgcctgaaaggcgcccgccatgtttcgggcgccacctaaccaagctattccgttgacggtcgcttctgctcatccctcttgcagaagcggcccgttttgtttcgagcgatcgccggcgggaaaccaagtctgccacagattgcgttccgccgtgtcgcgcatgacgctttgctcttatcatgctccttttcaggaagcgaaaggagcgtctcatgcgcgagatatccggtttggcaaaattcggctacttctgcgtcggcctcttcggcggcctgttcggcgtgttggccgcatggttcatgggcaaggatggttggggttggagcgagggcggcaagctgttcgcctggttcggctgcctgttctggctcatcgtgtgggttgtcatggtcgtgacgggaggcatcgcggcgtttctgggcatgctgttttaacgcgttcccgacaattcggccgcttcgatcgtgttaccctttgacggatcaaatagccgaatggagggaacgccatggatggacgggcgaagcggggcgaaagccttgcaggaaagacgatcgcgttggctgcagtgctggtgacgctgctggcagccggcacgttgttgagcgcatgcgcgcaacaacgtacgacgagccagttcgccgtggcgcagcctgctatccctcagaaggcgtctgagaacaatcccgaagcatggctggacgcgctcgagcagaacccgatcgatcaatccttcgtagactcgcttgcagcgttcgcctaccgcagcaccgcttcggtgttgggcgacggcgcggacgatgccaaggcgaaccgcatgtattctccgctcagtttgtactacgccctggcgcttgcgaacgaaggcgctgcgggtcagacgcgcgacgagatcgcctcggtgctgggtgcgcccagcaccgtcgacgtgccccagcagtgcggcaacctgttccgcgtgctgacaaccgatcctttctccacggtcgatctggcgaattccatatggatggcgaaggacgcctccttcgagcaatcgttcatcgacacggcgatcggtcagttctacgccacgccgttttcggtggagttcggcactgacgctgccgaccaggccatggccgcatggatttccgagaatacgggcggcaccatcgacccccaggtgaaaaccgagagcgaccttctgctgtccatcatcaacgcggtgtacttcaaaggcggttggatggatacgttcgatgcggcgaacaccgcgcccgccgtgtttcacgccgcatcgggcgacgtcgaaacccagttcatgacgcagcgtatcgactcgctgcaaggctttcgccagaccgacgacttcctgcgcgcacgtctggcgttcacgggcggcacgatgatgacgttcgtgctgccggccgaaggcgtgtcggtggacgacctgcttgccgatgagcagcgcttggcccaggcttttgccgttgacgcgaacgaggacgagtacggcttcataacctacgtggtgcccaaggtcgccttcgataccgaacttgatctgattccggctctcgagcgcttgggtatgaagacgccgtttagcgacaaggcggatttctcgaaccttacggccaccccggccttcatctcgatggtgaagcaggaaagccatatctcctgggatgaggagggcgccgaagccagtgcgtacacggatatgggaatcagcgccacatcggcgatgattcccgaaggcgaggaagtggagctgcggctcgaccgcccgttcctgttccagatcacgtcgtcgcacggcgtcccgctgttcatgggcgtgtgcggcaatccggctgcgtagcctgacagcttgccgtgcagtcgtccgccggctgcacggcgcctgacagagcgcccgtcccgtcccgtcccgtcccgtcccgtcccggtgggatccttcgatgccgatgtttcacgtgaaacactcgttcggtttactattcgaaacatgctttgcccgcaacgccgccactcagcggcgcactgcgtgcgcttcttgcgagccggctcgtgtgcagtgacccgttaagcgcccttgcggatgcggcgggggaaagcgcgttctttgcttgatagctgctttcggtagtctgtcggtggagacggcctcgctgattcttcaagcgcggtcgaaagaagaaccccggtcgtcccagcaaggggacgacccgggtccaaaatagaatccgaaccgccgaagcgggttcgagagccgtggggagtaaccagctccctgcggctcgcctgctattgtaggcagtacgccgtttgctcgcaaggcgcttccggctttcgcgcacccgggccgatgccgttgcgtcacgtctgcgtcagccgtcgggcgcgacgcaaccgccgtactgcagcagcgggacggcggtcgcgtcgctcgtgctagggtcgcgatgcaaaacgagctcctgaaacgcaaggtttctggagctcgttcatctgcgaagtggtgcccgaggcgggatttgaacccgcacgtctaagacaacggtttttgagaccgccgcgtctgccattccgccactcgggcgcaggatgacagtataccggaattcgatcaaagcatcgagtagaaaatagcgtcgagtccgcgattgcgaatacgtcgtcaagccttcatgcgtcaagctcgatcgaacccgccgagctcggctgcgggttcgagatggctcgatcggcgcagtctcttgtcaccttgctggggagccgacgctccgtttcttcgcgcatcgtgcgagcgccatgcagcacaggcttgccgcggctgccagtgcgagggcggcgatcggtgcctctccatcgccggtggcggcgagcgcttttgcgggcatctggcggatccgcgcgtcgtcggtgccgttgtcatcgggtgcgctgccgggatgctgcgcgccgtcgcttgaggggctgccccccgaaggctgatccccgccggaaggcgcgtctccggcatcgtccgacgggggagtgccgccggacggatcgttgccctggtcgccttcgccctcgtctggttcggcggtttcgtaaaagccgaatacggtgtggggcgtcgttccgcggtcgcttgcgatgcgtaccgcgtacgccaaaacgcccggctcgaacagcagcgggtcttccagcggcaggaagggcgcgctcaagttgaggatctgctcgtaggtggtgagggtcgcaacctcgtaatgcgcgccggggaggcttgccagctgaggcgagctcagtgcgatctggcttcccggcttcaccggtccgctcgacgggtttgccgctatcttataggaaacaggcagcgaagaggtggcgaacttcgtttgggtgccggacccggcgttcgcacccggcgctcccgaggctgccagtgaggctatcgtcgccgagccgcctccttgcagcgacttggagggttccggcacggaaagcaggggaacttccaacccgtccacgatggacggattggatcctgcgcggttcaccaagctgtgcgggcccgtttcctcgcgcaggaaaagcgccgtcgcgtaaccgagggcaaggtcgtccaggctggccacggcgcagtcgtcgccgacgcccgcgtacccgatgttgtcgagtgcggccatcaggctctccgacgtgcactgacccagccctcgctcgtcccgcatcgcgtcgaacaccgatcggtacacgctgtctccgcctccgggaagcccgcgggtttggttggcgagatagcgcgagaacaggtaaccgtgcgcgtacaccgctgttcctcctgcgcccagagaagcgtccggcacgaagctcccctcgtatacgaacgggggaatgcggccgctgaggttgaccatcacggccaagttctgagctcgggttttctgggtggagccgtatcctgcgatggccacggccgcttgggagaacgcctcgttgagccatgcttcgctggagccgtctgtctgcgcgaagttcaccaggtgctggaattcgtgggcgatcatcggcgggacgaggctctcgtcgaactcgcccacgccctccaacgactttcggttcagcacgttgaggtgcagcacgtccatagcgttggtgtaggaggcctcttcgatcaggtctgcagccgtcagctgctcgggtgtgtacaagtcgatcgaggtgaaatagccgtccagcacctccgtctccggcgggaatcggtggaagacgaacgcggttttcccgtcgccgtccaaatcgacgcgaaccgtcgacccgaaggcgtccgttacttttcgaagaacggggtcgatcttgccagccagcctttgcaccagatctgcggggagcatgtcggactccgcgtcctcgacccacagggtgaacagctctccgacagccactgccgtggccgtgaatccttccggacggcctgcggcgcgaaacgtcttcgaatcgcctacctggtaatcggttttctcggcagtcgtgatgcgaggttcgtcagcggcgatctgctgcttcagcgaggacatcgtctcggcatcgcttggcgcaaaagagcgcgcgccgcaaaggggcgtttccccggttgcgccctcgtcggtcgattcgccttcatttccggccgaaaggggcttgtcggcactcgggtagccggacgggaacagcgcgtcgtattcctcggcgctgccgatgggcgtcatgttctgcacgatgacgacttcgttcgcctcgggttgcgcatgcgcgggctgaggcgcgaaggcgagattgcttgcagcgagcgcgaaagcgattgcgatcgcgacgatgccgttcgagcgtgacctcgtgcgcagcataggggctctttcttttccgggcgtgcgagaaagcgagtatagcacggctatggccgcttctgaggagtgccgggcgaggggctgctgctattgcgtctgcgaatcgtggcggcggcgaagctttatctgcgcgatcatcgccgcaacggcggcggctatcgccagcgcgagggcagcgggtgccgccgcgctgtcgccggtggaggcgagcgccttgccgggcagcggttcgacctgcgtgtcgccggagggctcttcgccgtcgggctcgccggaagaaggcgcgccgttcccgtcggaggggctgccgcccggcttgttcccgtcttcgtcagccgggcccgccgccttctgctcgaacacggcgaacggcgacagctcatcgacggtcatgctcgcaagaccgttttccaccgcaaccttcgccgtttcgagcgagccgtcggctttccggtggaccatccagacgctttctccctcgtagcgcttgtcgaccgagaacgacacggagagcttgccttcgtgcgcggcattctcgccggtcgccgcgtccaccaccgacgcgtcagcgctgacgatgagcgcgcccagctggtcggacgcctttgccatttcggccttctgctcatcggtcagggccgagagcgccaaggagagctcggcgcctgcggggaacgatcccgacacttccacgcgcgatccggcgatctcgccgacgtgcgagctctcctcgtagccgccgcccggctggtccggctcgggcaggtccaccgtcacgctcatgacgtcggccacagcgtcgcccaccgagaggacgatgccggagtccacgcgctcggcgggcgtgttgcagccgtcgtactgcagcagcggaacgacgttgccctccatgccgaacgtctcgcaggcgttggcgttgaagaacgggcgagtgtaaagtgcctggccgtcccgatactccgtattctccggatagacgggcatgacgcccggacggtggtcgaccgtgttcacggtgttacccaaaaggggatcgtcggcggtcgtgccgcgcgcatccacgattccctggtcgatatgccagatgacgacgccgcccgtttcgttgtagtattgcggcttgtctttatggcgttcggcgcggtacgaggacgtcaatccccggtcgaagctctcgtactggcggttctccaccagatagtactcgccttcggtgctggtggggacgcgcaggcaccggtagccctcgtcgctccagagcgtggagacgtcgtacgtgccgtcggcggctacctcgacgggctctatgtagccgagctgttccaagcagaaggggtcgaagctgacggggacgaagacagtttcgccgctatcggcaatgtagttgccccacgatccgcctgccatcaagctgatttctcctacgtcgtaggccaaccagggaaattggtcgacggtcgcatcgggatcatacgaggtgtagttgacatcgtacaggtcgggcagtcccaggtaatgtcccagttcgtgcgcgacggtgctcgtgggcatgggctgagcggtgacgacgtcgttcgtaaggatttctcccatggtgatgtagtcgtcgaccacgatttcgctgtgcgtgatggggttgacgatcgttgcgggtgcgaagctgtccttgtccatgctggacagctgccatcggcaggcccaggttgacggatcgatttcgcctcccgaggattcatagcccgccacgatgaacagcaggcagacttcggtcggttcgagcacgccgttgccgttcgcgtcgtagtttgcgaagtctatgtactgggaggcttcgttgagcgcgtcgacgtacgcgtcgtgctggtctttggcctcggggctcatgaattccgcccctttccagttgccgtgattgcggtcgagcgtcacgtggatcacgccgtcgccgggcgcgtcgtacgcgttggtgttgccgccctccccgtacgcgctggtctcctcggtcgccggtgtccaggagaacttgtcgttcgacatggtggcgtagtagttggtgatgctgttctcaccgctgtagagcagcctgttccaatcgtagtcgtcgcggtagcgctgctccgaggccttccacgtcgacccgtccggtcccgtgacgatgtcgtcggggccgaggttcgtgccctcgtcgcctgcgaacccgatgacgatggtgatcagcggcagggaggtctcggtctgcgcgaccgaccgcgcgtttcgggcgcctgcgccggacgcggcctgcgcggcctcgatgtcggagagcgtcaccgcctcgccgacgccccggtcccgggggacgtaggcgcctccgcccagcgcggagtaggccatcttgccggtatcgtttgccagcaccgagggcgccagagcgttcgccggtgcggcctcgtcggcgcgcggcccgagcgcgaggccgaagccctcgcttgtcacgtaataccacgtctggtcggcggggctcttctgaacgaggagaccctcggtcgtccgcacgtagtggaagaactcgtcgccgcgctgcccggcctggaaggtcgctccgtcgggctggacgtagccctgctcgatctccagggcgggcccggcataagccgcgctgggcgcgaggcacagcgagaaagctagcatgaagaagacgagaagcggggcgcgccttaccgtgcgggccggttcgccggtctttcgttgcataattccctctcttcaacggggagctgctttttgcgtatcgatagcgtcagaataccacagcgtaaagccgccgttcgccgcgggaggtattccggacggagcgcggctgctgcaaatacttcaaatggggagcatcgcgagacgcgccggctcagcggtcgttctcgtatgcaagctcgatcgtctccaagaggtccagcagctcctgcttggagtggatgtccagcttcttgtagatgctcttgctgtgcgatcgcaccgtgttctccgatatgaacagctgcttcgcgatgctgggaacgtcccttccctttgccagcagcaacgtgtcgttttctcgcgccgtgaggccgtgttgctgcgacaggaccgcgcaccgctccgaaaccccatcgacaaccgtggctttcgcttcgaccgggtttcgcgttgtggcatcctcccctcggcgcttcttgcgcgcctggatggccgcatacgacatcgccaggatgtagaacacgaacagaacgatgaccgaaagcgtggctgcgccgaagtttcgcgggtagtacacccatgctcccaacgcggtcgccgccgcaaagacgaagtacgtggctcctgcgaatgctccgtacacggaggtcgccggcacgctatgtgcgcgagctacggagatgctggttgacatgatgaacaccgaaacaaatgtgaacagcacgtacaccaaggtcgcaaccgaaagcgccagcgaattgcccacgatcgagagcgccaagagcgccgtgacgatgatcgggaagaacgctcggtagagtccgagaatgctcagctttttgaacggcgcgcgatcgtctcccaacacgaaccatatgccgtagagggcgagcgcgacgactatgatacagccgctggcgatgaggttgatcgcgtcggttcgctctatcccgtcgagcgtgatggctcgcgtcagggcaacggcgaaggcgatggcgcatacgcacagcagcggatcgctcagctcggcaaccgcgctcttcaaggctccctttcgccttttcgagttcgtgcggcgatcttcgttcgacttgggaagacggagggtgataaggcagaaaacgaccgccaacgcgacaaggaaggggaagaccatccacgtgcggtcttgcaagagcgcgaatagcagcaggtagcctgccgattggatgaccagggcgaacagcagcgttttcactacgtcgtcgaacgcaagcgacgataggcgatgctgccaaactaacgagagaagaccgtatcccacgcctaccagaatcgccgatgtgctcaccgttgcaaggcgcagaacccccgtcgtctccatgaacagaacggcgtacccgcccaaaacgaagacgcctgccgccaccgcagctgcgctcgaacagcgctttgtcggcggcttgcgtttcgctagaaccgagaagaacgtcaacccaagcgctatgagcaggggaatcgaccagtatttcagtatttcgggtattcccaggcgcgtgaggccgcccaaggagagtccgccccagagcgtgaacaatccgacgagcagggcgagcgccaagccgaaatacatgatgatgcgatgtcccactctgcccccccgtcgcgaacgctttgagtccccgcgcctattgtaacggttctgggcaaaaccgcccgtgccatgtggggcgtgaggcctcgtttcccctcatttcacatgccgcatgtgaggaaaaatgcccgtgtcttgcgtagtctgaggcggtcgccgaaggggcgatggagttgctttcgagcaagaaccaaaacgacatgcagggaggatgcatcatgggaaccgaattaaccaggcgaagctttctcacggggctcggagttgcgggtatagccgccgcaggggcggggctggccggctgcgctccggcggccaacgattccgcggcggccacgggcaatggcggcaaggcggcgggcgcaaacggggcggccgcgaacgacaccgagttcatcgcggcatcgtacgtcaacccgcaggataccgattaccgccagaacaccacggatttcagcacgctcttctcgccgatcaagatcggctccatcgagtcgagccatcgcatgatcaagtccgccgccggatcggcgacgtatctggccggcctcaccgaggaattcttccagtactacgtcaatatggcgaagggcggcgtcgagttcatctgggtcgagggcgaactgggatcccttatcgccggggacgaggccgcgcccgatgcggctgacttctgcaagcgtttggtcgacgagtgcgcgcagtacggcacgtcgctcggcttgcaatgggcgtacatgggcggcgatgtggccgagctttcggtcgacgacatcgtgaagatcgaggatgtcggcgtcagccttgcgcaaaccatccagggcatgggcttcaaggcgctcgaaatcaacgcggccggcttcaacatcggcgagcacttcctctcgcgcttccacaacacgcgcaccgaccagtacggcatcggcagcttggaggatcgcgcccgcttcgtcaccgagtgcatcgcgaagatcaaggctgcttgcggcgacgacttcgtcgtgcagatgctcatcgattgcgtcgaggaaaacgacaacctcaccaacaacgcgacgctcatggacctcgacaacaccctgaccgctcccagcaacctcgtgatcacggtcgaagagggcatcgagttcgcgaagctgttcgaggccgccggctgcgattccatgcacctgcgcctgggccctctgggaaaccacccctgtcagttcgccagcgatctgtacttcatcctgaacggcattgagggcgcgaccggctacggcacccaatgggatttcagccgccacttccagggccagcttgacggaagccacagcggcgccggcatgctgatcgacgtcgtcgcgcgctacaaggaagcggtgaagatcccctgcggcacggtcacctatatggatccggcgcacgcccccgacttcttcgagcaggcgcttgccgacggcaaggtggacttcttcctgatgaaccgcccgatcaccgtcgacagcgagtatgtgaacaaacttcgcgaacgccgcgcggacgagatcgccccgtgcacgcgctgcctgcactgccatatcggcagcaaccagctgaaccgcatgatggggtattgccgcgtcaacgcgctcacccagcgcgtcatgaccgagcaggggccggccacctacgagcttgagccggcatcctccccgaagaaggtcatggtggtcggcggcggccccgccggcatggaggctgcgcgcattgcggcgttgcgcggccatcaagtgtcgatgttcgagaagaccggttctctgggcggcatgctggggttcgcgagcatggtgaagggcccgcacgagaacctcgacgaccttgcagcctacctggagcgacagcttgagatcgccggcgtgaacgtcacgctgaacaaggaggtcgatcaggccctcatcgactccgaggcgcccgacgcggtcatcctggcagtgggcggcacgcgcaccaagctcgatgtgagcggcggcgtccccgtcatcgatttcgactcgttcatgaccgccgacatgggggagaacgtcgtcgtgtacggctcgaatgcccaggcgttcgattgcgcgctctggcttaccgtgcgcaagaagcacgtcaccatcgtcacgccgagcgccaacaaagacctcgacatgcagcagtcccagcatgcgatgcgcttcatgaccacggcgctctattcgctgggcgtgaaggtgtacccgggggcgtccatcaagcagatcggcgacggccaggtcaccatcgccaccgaagtgggcacgaacgtgaccatcgattgcgacgccgtcatcgatggcgccgagatggagccgaacaccgctctgctcgacggcatctccgtttccgagacctatgctatcggcgattgcaacgagcctttcaacatcgcccttgctatccgcagcggaaacgacgtggcgcgagctctctaaaacgcaccttttcggctccccgccctctcccttccctcctagcggacgggccgatgaagggttttcgtccaagcgaccccatgcatgcgtgcgtggggtcgcttggcgtttcggtcaacagatggatgacggcctagcgcaccgcagccgcaagcatcataatgaaagtatctacgtgcgaacgcggcgtttcggccgctttcgaagccgacgcactcgaatagagaggcgaatttgccatggaacatgctgaactgaccaggaagatcgacgcgtatctcgaggaaaattgggagacgatggtcgaagacatcgagacgctcgtccgcatccccagcttcgaggaatcggacaaggcgaccgaaggcgctccgttcggccccggcccgaaggaggcgctggaagccgcgcttgaaatggcctccgacatgggattcaagacgcacgatgccgagggctacatcgggttcgccgacttccccggcaagagcgacacgcagctgggcatcatcggccacatggacgtggttcccgccggtcccggctggaacttcgagccgtacgcggtcacgcgcaaggaaggctacctcgtcggtcgcggcacgctcgacgacaagggccccagcgtggtggcgctgcacgccatgaagttctggaaggacttgcaggacgccggcgaggctcctcagttcccctacaccgtccgcttcctgttcggcgcgaacgaagaatccggcatggccgacgtggcctactaccacaagcattacgacgatccggcgttcctgttcacgcccgatgccgagttccccgtgtgctacggcgagaagggtggctacgacggcgagctgatcagcaagcccatcgccgaccgcatcgtgctggagttcacgggcggcgcggccacgaacgcggtgcccggcatcgccgaggccgtggtgaaggccgacgctgccgacctgccgaatactgatcgcattaccgttgcggccgacggcgaaggccgcgcgaagatcactgcggccggcaaaggagcgcacgcctccatgcccgaaggaggcgtgaacgccatcggcctcatcgtggactacctgctggagcacgacctgtgcaccgccgacgagcgcgcgttcttcgagctcgaccagaagctgctcaatcataccgacggcagcggcatcggcatcaagagctccgacgagtacttcggcccgctcaccgtcatcggcggcaccatcaaaatcgaggacgaccgctttgtgcagacgctcgacagtcggttccccacgtccatcacggccgacgagatcaccgagcgcctgcgccagctggcgagcgagatcggcggctcgtttgagaacacgctgcttatggagccgttcctcgtaaagcccgacagccctgtgatccaggcgctgctgaacgcgtacaacgaggccaccggcgaggacgcgaagccgttcaccatgggcggcggcacgtacgcgcgcgagttcaagagcggtgccagcttcggtcccgaaaagccgtgggttgaggatcccgaatgggttggcatgatgcacggtccggacgagggcgtcagcgaggacctgctgaagcagtccttcaagatctacgcgctcacgctggacaagctcatgcagctcgacctgcaatagcgaagggtgtgtcaaggggacgggtgatttgacgcgctccgccccggtcgtcatcctgagcgcagcgcgaagcgcggaatcgaaggattccgtgaggcgctagccggaagcccccccggctagcgccgacaaaacgcttccggctgcgcgctcatcatcgtcgtcgaaaggcttttcccatgtcccaactggatactgtccccaccgatttcgcccctgctatcggcattgctccggccgaaggcctcgagagcgaagaaggcggccgcatcgtgcttgagggtctgccaaacacgcgcgacgtgggaggcctgcccacggacgacgggcgctacgtgaagcatgcgcgcctgctgcgctcgggtgcgctcgaccatgccaccgcccgcgacctcgaagtgctgcttgacgactaccaggtgcgcacggttatcgacctgcgcaccgaagaagagcgcaaggagcatcccgacccacaggacggcctggtgggcgttcggttcgcggatgcgccggtgctgagcgcctccacattcggcgtcacgcgcgagggcggcatgatgcaggcgctcaaaatgctgcgcaccgtgcagaagaaccctgccagcatcatggaggaagtgtacgagcgcatgatgttggacgagcagagccagcgcggcttcgcgcagttcttcgacgatgtgctggctgccgaggatggctccgtgctttggcactgcaccatcggcaaggatcgcgctggcttggccgccgcgctcttgctgcacgcgttgggcgtaaagcgcgaggccgtcgagcaggattatctggccacgaacaagtacgtccaatccgaaacgcagaacatcatggacgcgctttcctcgttcggtctgggcgacaagctggataagagcattcacgtgatcaactccgccgatccgcgcttcctgcacgccgcgctcgatgccgtggagaagcagtacggcagcctcgacgcttacgtgcgcgaccagctgagcgtcaccgacgaaaagcgcgaggccctgcgcgctcgctacctcacggacgatccccgcgggtaacggcggatttaccgatggtcagcggtggttgatgttctttcgtcggtttgcttgctcctatctttcggcttttggccggtttcggtgatccatgatttataatggtcgaaagcaaacgtacggagggtaggaggcttaggtgttgaaagcgatgatcgtcgatgacgaggctcctgcgcgttcagagctgaagttcctgcttgacgagctggggcagacggaggttgtcgccgaagctgccagtgtgcgcgaggctatcgagaagttgaaggaatatccgtgcgacgtgatgttcctcgacgtgaacatgcccgaagccacgggcttgcagctggctgaggcgctgcagcacctcaagttcccgcctgcggtggtgttcgtgacggcgtacagcgagttcgccctcgatgcgttcaaggtgaacgccatcgattacctggtgaagccggtcgaaaccgagcgcctgtcgcaagctatctcgcgcgtgcgcgagcacgtgtcgctgcacgtgcaggctcagaagtccgagcgcattcccgtcgaaaagggcggcaagaaaatcctcatcggcatcgacaagatccgcttcgtcatggcgcgcgacgactacgcgtacctgcaaacggatacggatcgttacttctccacggtcagcttggctcagctggagaagcgcctcgacggtcacggtttcttccgcgtgcaccgcggctatctggtgaatctctcgatggtggaggagatcgaatcggtgtcgggcggtacgctgctgctcacgctgaacgccgtggacgagaaaattcccgtgtcccgtcgccgagtttccgctttgaagaaggcgctggggctgtaaggcgcgtccgcataacgaacctcgaagggccggagaatcgtcggcccttttctttttggcacgagcgccatcaggaaagcggcttttccctcctgcgtccccgcgtgagtgaccccgtcatcccgagcggcgctgcccccccctttgtcatcctgagcgagcgaagcgagtcgaaggatcccgtgcggcgtcggccataaaatcatctgcaataatcgcacggatcttcggttccggcatcttctgcctgtgctcaagacggcagtcccagcgatgtttcacgtgaaacatttgttcgcttgtcgcatggcattacgacaagtgtttcacgtgaaacacttgttcgcgcaaaccgcggacagtcgcgaagcccgcaagcggcagacggggacgcatcggcaccagacaggcgagaggttcgcgcgcagcgggcggcgcgaggttcgcgggcggcggacaggcgcgaaggtgggaaatcgctccaatcgcatgcgagaatgcgaaaagcgcccgagaggcgaaccctcgggcgcttccgacagagaaatgtggggtaatggcctagtaggcggtgaaagacgacttcggagccaggcagatgggacaggcggtgaagttttcgcccttgtggatgtagccgcagatggggcacaggtagtacttgccgtcgaacggggtgtcgatggtggtgtacgcatccatatacagcttcgcatgatacgcctcggcaagcttggcgcgcgtgaacacctgcacggccttgttgttgccctcttcctgggccttcttgatgaaggagggatacatgtccgaggtctcgtagatctcgccgttggcgccggagatcaggttgatgtcgctctcgtgctcctcgaccgcgggcggctcgggcttctcggttgcggggtcgatctccttggccaggtcgtactcgaggccgatgtggattttctcggcgtccgcggtgcactggaacaggcgggccagcacgtcgaagccctcgttcttggcgaccttcgagaacgcctcgtacttggtggtggcgcccgtctcgcccgcgatggccgtcataaggttttcgtaggtggtgccgacggtggtcttgctgtcgtagatgatgttgaaattgctcgccgtcgaggcatcgggcatggatgtgggttccagcacctcggccatatactcgctgttcgtcccgctgccggttccggtgccgtcggcggacggatcggtcgtggtttcggccttcggctcgctcggggcggcgcaggcgcccagcaggcccatcgcggaaatggacacggcgctgacggcggcgcccttcaacaggttccttctagaaatatcggacatggttcctccctcgtcttcccgatgggctcctctccagcccatctgatatcgatactatatatcaattaatataaataatcaataatgaaatagtacgggaatgcttgggatttgcgcgctgattctcgttctcgggcgcgctcccacacgctttgtccacaactccgtcacaagcgcaaacacgatggtcagcctcgtcaccgtttgctagaatggagcgaattacgctgaaagaaggttgtatgctatccggtgatgtagaaaaactgtatccttccgcgaaagccctcgtgaaggactgcgttgccagccgtatccatgccaaggatgcgagcctgtacgacttctcggaggaagcgcgcgcgtgctccgagcaatacatgggatggacggaccttgcgagcaattcgccgtactccctgcgcgacatccagaatttcgccgactcgatcatcgcccaagggctgaagacggtcgtgctcatcggccagggcggttccacgcaggcgcccatgaccatcacgaaatacaacaagcccgattcgtcgaagatcacgttcaagacgctggactccgactcgcccgtgcgcgtgcgcgccattttggccgaagcgaagcccgagaccacgctgttcgtgatctcgtcgaagagcggcggcaccatcgagccgcgcctggccctgcgtgccgtgcgcgacgccgtggccgaccgcatcagcgaagaggagctggtgcagcacctcgtggccatcaccgaccccggctccatgcttgagcgccaggcgcgcgaagaagggtgggccgcggtgttctccggccagcccaccgtgggcgggcgcttctccgcgctgtccgtgttcggcctgctgccggcggcgctcgtgggcatcgacctggaagagttcatggcgcacgccatcgacgccgagcgccagtgcagcgaggacgccatcgacaacccggccatcggcctggcatcgtttttgtacgacaactacctgcagggacgcaacaagttcacgttcctcacgcagaagcgcggccgcgttctgggtctgtggatcgagcagctggtggccgagagcctgggcaaggacggccagggcattctgcccaacatcgaggtggactccctgctgctcaagaaagacccgggcgatcgcagcgccatcgtgtacctcacgcgcaacgacctgtgggacgagcgccgcaacttcgagatgagcctgtcctacatcgacccggccatcccgcgcgccaactacaagatcgactccgtcgaagagctggccgagcacttcgtgatgtgggaatacgccatcgcgatgtgcggctacctcatgaagatctgccccttcgaccagcccgacgtggcgtcggcgaaggccgtggtgctcgacatcctcaaggagggccagcccgagcccgacttcgtgcaggatttcatcgacgaggtgcacatgggcgaggtggaagtgcgcctgtctccgtgcttcaaagattgcaccgatgtccgcagcgcgctgcgtgcgctgctgggcagcattcaaccgggcgatttcttcgcgctcaacgcgttcttgccgttcacgggcgagggtcgacgcgaggcgctggaaaccatccgtcacggcgtggctgagaagcgcggcgtggtatcctgcctggaagtgggtccgcgctacctgcactccaccggccagctgcacaagggcggcccgaactgcggcgtgttcctcatcctgtcggccgacgagctaaaggacatcccgctgaagcaggaggctgaaagcctgggctcgctggccaaggcgcaggcgtcgggcgacctcgttacgctggccgagcgcgggcggcgcgtggtgcacctgcacctgcccgacaactcgggcgttacgctgcgccagctggctgaagtgatttccgacatcctggaaaccatgacggtgccgacggcttagcgggcggccgcgcgacacgatagcgttacaccccgagggcggccgtcgagccgccctcgtagattgaaggccacagcacaacgcggaggcgatcatatgaaggaagcgctggacattcaagtcaaaggcatcgtgcagggcgtgggctttcgccccttcgtctaccgtttggcgaagaaatacctgatcgacggatgggtgctgaacgccaccgacggcgtgttcatccatgccgagggcgagacgaagctgctcgacgagttcgtcatcgagctgtccgagaacccaccggccgcctcgcgcgtggaggaagtgacgctgaaggaagtgccgctggaggacttcgactcgttcgagatccgcttctccgacgcaggcgccgtggagaagaccacgctcgtgtcgcccgacctggccacctgcgacgattgtgcccgcgagctgttcaacccgaacgaccgccgctaccgctacccgttcatcaactgcacgaactgcggcccgcgcttcactatcatcgagaagctgccctacgatcgcaagagcacgtcgatgaaggacttccccatgtgcgagcgctgcgcccgcgagtacggcgacccgttggaccgccgcttccacgcgcagcccgacgcgtgcttcgaatgcggcccccatatcagctggcgcgaacacgagggcatgcccggagcgctcgccggcgttcatgcccccggcgtttccgccgacgtgccggccgcccctgacgtccccgctggcgcttccgcctcccatgcggcgcaaacaaatgtttcacgtgaaacattgtgcgcttccgatgccattgacgcgcccctgggacccatcgcctggggaaccacgcgcgaggagagcgatgccatacttgcgcgcgccgtggaactgctgctggcgggcaagatcctggccgtgaagggcctgggcggtttccatctggtgtgtgacgcgtcgaaccccgaagcggtggcgttgctgcgcgcgcgcaagcgccgcgagggcaaggcgttcgccgtcatgatggccgatatggaagccgtgcgtgcctattgcgaagcgggcgaagcggaggagggcatcctcacggccacgcagcgccccatcgtgctgctgcgcaagcgccccgatgctgtttttgctcccggcttggccgacgccctccccgaactcggcgtcatgctgccctacacgcccctccagcatctgctgctgcacgacttcgcgaaagcgagcggttgtgccgagcgcagctcccagcgcgaagccgaaggatcccgcgcagcgacggccgtccctatgctggtgatgacctcgggcaacatccacgacgagcccatcgtcatcgacgacgaggatgcctacgagaagctgttcgccgtggccgacgcgttcctgggccacgaccgcgccatccgcgcccgctacgacgactcggtggtgcgcgttatcgaagcgggcagcgccggcgaagccgtccaattcatccgccgcgcccgaggctacgcgccgctcccgttggcgatgcccgcgaaggcgcgcgaaggagaagatgtttcacgtgaaacatccgttcgcgaacagggttgctccatcttcgccaccgggcccgagcagaagaacacgtttgcgctcacgcgcgacgccgaggcgttcgtgtcgcagcacatcggcgacctcgagaacgccgaaacctacgacgcgtggctccaggcgaaggaccgctacgaaacgctgttcgagatcgaacccgaccgcatcgcgtgcgacctgcatcccgagtacctcacgtcgaagtgggcccacgagcagagcctccccgtcaccgaggtgcagcaccatcatgcgcacgtcgtgtcggtgatggccgagcacggcctggccggccccgtgtgcggcatcgcgttcgacggcacgggctacggcatggacggcgccatctggggcggggaagtgctgctcaccaacctgactgcgttcgagcgtttcgcgaacttcgcctacgtgcccatgccgggcggcgcggcggccgtaaagcatccgctgcgcatggcctacggcgtgctgtgggcgttcgacctgctcgaccatccgggggctgcggctgcgctcgaggctctgggcgagcaggcggccgtgtgcgatcagatgatcgaccgcggcatcaacacgcccatgacctcgtccgtcggccggctgttcgacgcggccagcgcgctgttgggcatctgcgccgagcctgcgtacgaaggcgagcccgccatcctgctggaagccgcaatcgggcgaacagatgtttcacgtgaaacatctgccgccgacgcaaccgatgcgacccctgctgacaccaaccgggatccttcgactccggcgcttcgcgcctccgctcagaatgacgatgccgggcttagcgcctccgctcgggaagccgcgtcccgttacgccatcgcggtggtgaagaacaccgccactgccgccagcacggcgcaggacacctcggtcgtgctgttcgatgccgcgccagcgttcgccgcgctgctcgacgacctcgcggccgacgtgcctgtcggcatcatcgcgcgctgcttccacgacgcgttcgtgcaagccatcgtcacggcggccgagctcgtgcgcagcttgtacggcataaccacgcttgccctgtccggcggcgtgttcatgaaccgctacctgctggagcacgctctggcggcgctcgagcaggcgggtttcacggtggccgtcaaccgcgatctgccgcccaacgacggctgcatctccttcggccaggctgtggtagcatgggcttcgagcaaagaagaaggagaacagccatgtgcttagccatacctgcaaaagtgactgaaatgaaggacaaccgtctggctacggtggacatcctcggcgtcacgcgcgacatatccctcgacctcacgccgcaggcgaacgtcggcgacttcgtgctggtgcacgccgggttcgccatcgaggtggtggatcctgactacgcgcaggaaaccatcgacctcatcaagcagttccccgagctggcgggcgacgacatccccgcagccgacgaggtagcgcgatgacctcctcgaccggaacggatgtttcacgtgaaacatccgtcgagccgaaggataggcccgagcacctcgcgcgcgcggtcgacgcggccacgatggaatccgagctggcagccttcaaagaccctaaactcgcgcgcggtctcatcgagtccatcgcgaagctgtcgcccgcaggcggcgccacgctcatggaagtgtgcggcacccatacggtggccatcgcgcgcaacggcatccgcaacctcatgccggaaggcacgcgcctggcgtccggtccgggctgtcccgtgtgcgtgacctcgaacagggatatcgacacggtcatcgccctcgcccgcgtgccgggcatcaccatcgccacgttcggcgacatgacgcgcgtaccgggctccacgtcaagcctgctcgccgagcaggcggcgggccgcagcgtgcagatcgtgtactcgccgctggacgcgctcactctggcccagcagaaccccgatcgcgagatcgtgttcgtgggcgtgggcttcgaaaccaccacgccgctggtggccatggccatcaagcgcgcggccgcggccggcctcaagaacttcagcgtgttcggcgctcacaagaacatgcccggcgcgctggaggccatcatcaacgacccgcagctcaaggtggatgcgctcatcctgcccggccatgtcagcaccatcatcggcgccgagccgtatcggttcttggccgagaagtacggcatacccggcgtcatcaccgggttcgagccggttgacgtgctgcagggcatcgccatgatcatgcgccaactgcacgaaggccgtgcggacatcgagatcgcctacgcgcgcggcgtcatgcccgaaggcaaccccgtggcgctggccgccatcgacgaggtgttcgagacgtgcaccgccctctggcgcggcctgggcgagattcccggttccggctaccgcatccgcgaggagttcgcgcagttcgacgccgtgcgccgtttccagcccgacgtcgagcccacgcaggatccgaagggctgccgctgcggcgacgtgcttcgcggcatcatggcgcccaacgagtgtcccttgttccgcaaggtatgcacgcccgagaaccccgtgggtccttgcatggtgtcaagcgagggcagctgcgccgcgtaccaccggtactactaaagagaaaacaggcgctgcagcatccgaaggacccctcgtcgaggggtccttcggactatcttcgaatgtttcacgtgaaacattcgttcgatagactcggatacgtcaatccagcggcaagacgacgcgggaaatttcccaaaagatattcttttcagttgattgtgcagtccctatgctcagcggcgcgctcatgttcggtgctgtgcgtgcatgagttacccttttgtttccatcgctatacagaacgagagaattaattgcggataatatccaatattgggtcaaaaactgcataaaggagaaaacgccgtcgttcaacatttttgtgcatttgaacaatttacttattcgttttgctcaaatgtctatgtaatttcatgttgcagttgaacaaaaaagatggtataactggctcatcggcaaatctggaaggacttgccacgacggggtctaagccgtggcgctctctccagcgaagctgcagtttgtagttgtgccatccaaataggcggcgccggaagcgctgccggagaaaggagactgtcatggcgaagatagtcaattcttggaacgactgggatccgctgaagcgcgtgatcgtcggcctgtgcgacaactcggtcatcccgcccgaggagcccgcgacctccgagaaggtgccggtcgactccgagatgcgcggcatgtggggtctccgcccgctgcgcacggtcgaggtcggcaacgcctgcctcgagaacctcgtgaaggcgctcgaggagcgcggcgtggtcgtcgaccgcccgacgcccctgcagtggaaccaggccatcggcacgcccgacttccgcaacgactcgatgatgacctgcatgccgccccgcgacatcctgctcaccatgggcaacgagatcatggcctccgccaactccttccgctgccgctacttcgagtacctggcctactggccgctcatgaagcagtacttcgacgaggacccggacttcctgtggacccaggccccgcgcccgcgcctgaccgacaagtcctacaagcacaactactacgacgagaagatctcgctggaggagcgcctggtgcgcaccgccaacaaggacttcgtcacgacggaagtcgagccgatgtgggacgccgccgacgtcatgcgcatgggcaaggacctgttcatccagcacggcctgaccacgaaccgcacggccatggactggttccagcgctactaccccgagcaccgcgtgcacgccgtgaacttcccgggcgacccctacccgatccacatcgacgcgaccttcgtgccgctgcgccccggcctgatcatcaacaacccgcagcgcaagctgcccgaggagcagcgcgcgatcttcgaggccaacgactggcagatcgtcgacgccgcccagccggcccactccgagccgcccgagttctgctacagctccgtgtggctgtccatgaactgcctggtgctcgacccgaagacggtcatcgtggaggcctccgaggtctaccagcaagaggagatggacaagctcggcatgaacgtcatccccgtcgacctgcgcggcgcctacgccttcggcggcggcctgcactgctccacggccgacgtctaccgcgagggcgagtgcctcgactacttcccgaaccgcgtcgccgacccgaccctggttcgcccggagatgtggaacgactagtcgcgtagcttgacctacttgtcacagacaggcatcgtcacttcgtaaaaagaaaggggattcggtttgcaaggcattccggatccccttttccttttcataatccaattatcacgcacaaacagatcggtcatgtaggatcaaaggtaagactccaatcgtttcgcattcgatcttgcatgacaagaaaacccctctgacagggggttaggtggggcatactcttttttgctactggtttaaggaggaccaatggcagacaacgctaacaaggaaatcaagaccgcgacagccgatgacggctcgaccggctacgagatgaagatcggtcttggcaccattgccatgctgatctcggcgacgggcatgggcttggtgcccctgttcagccgctgggcaactcgtacggacatgttcgacggggcgctgggtctgaacgctggcgactccatcggtgctttgatggccgtgggccgcatgagcatgggcgtgctgttcttcgtcgtcatcatgttcgctacgggcaaggtagagacgttcaagaaactcaagctgacgccggccatcgcgttgggcggcttgatgatcggcatgtcgctggcgtgctacgtgacgtctacgctgttgaccaccatctcgaacgctgttctgttcatctacatcggtcctgtcgtttgcgtagtgctcgcgcgcatcttccgcaaggaacccatgtctgctttacagtgggtatgcctggttgcggtgttcatcggcatgttgttcggcaacaacctgatgggtttcaacgagtctggcttcttcgtagacttcaacctggttccgtctacgcctgagttcccgcagaagggtctcggcgacgccttcggcctggcttccggcttcttctacggcgcttcgatgttcttcaacggctaccgtaaggacgccgacaccacggctcgtggtgtgtggaacttcatcttcgccgtcctgggcgctggtgttatcaccgtcgtcctgaactcgctcggtgcaaaccccggcatggagaactgggctctcaacatccacttcaccgcattcaactggatcggtgccctgcttttgtgggtcatctgcggtcctgtggctctgggcttcttgctggtggctggccgcaacctgccggctgctgactacggcaccattgcgtactgggaagttcccgtggccatcttcgtgggtctggtcgtgttcggcgaggccctgacggttaacacgattctcggtggcattctcatcatcggcggcggcgctatcccctctatcaagggcatgctttccgctcgcaagatgagaaaagaagaggagatttgcgagaatcttgccgctcgcttggaagaggaagaagtcaaggagcacctgcagtaggtttggcggcgtgcgcctggttctcgggcgcacgcctttccgctgagaagcggtaatccataaccggaaaggaaggggtgtgattcatgaagatcacgagcaacctgacccatgttgccactgaaatcgagttcgaagcgccgttgaacgaggaggagctgctcgccgtgttcgagaagagcggcgtccagggcttcccggccgagctcgacatcgccgagcgcacggaggaccacgtccagatgatgtcgcttgacggcctgctgggcttcgccaaggcgtccgggctgtccgcggtgacctacgacgtgacgtacttcccgcacgccgacgacgcggaggtggcctaccagctcaggcagctggcgcgcgacctggagatcagcgccgaggtcatccgcgacgtgtgcgcggccgagatccaggagtacctggccctcgacgcgaagcgcgacgccggcctgcccgtccacagcatcgtggaggcctacacgggcggcaccgcgttcgcctggtacggcatgagcgactacccgcgcctcaagcgcttcatcctgcgcaagctggcgcagggcggtcagaaggccaagcacagcttcatcatgcgcgccagcaaggcccaggtggatatgctcgacgagtactgatcgtcttttgcggttgaaccttcgggttgccctacggcctgtcagcgagaacgcagcacgtccaaaattatgcgtttcacgaggcattttaggtggagcccgtttgctgcaaaacgggctccacgccttttcggggcagggctctcgacggttcaaacgcatataaaaggttacaggtttacctcgtattgccgtttttgcggtatgataacctcaggttaaggcgttttccgactatcgaaaggggcttcttttggagcaccagatacgccgacagcttgcgtgtacttctaacgaagctgctaatttcttaggggattaccatgggatctaacgaccaacgttccactatcagaaaagtagccgtttcatcgttccttgggaacttcatcgaatggttcgactacgcaacctattcgtacttcgcagtggtcatcgccaacgtgttcttccctggcgacgacccggcgcttgcgctcatgcagacgttcgcggtgttcgcgctttcgttcctgctgcgccccatcggcgccatcttctggggcagcatgggcgacaagaagggccgcaagtgggccctgtccacgtccatcttcctgatgaccggcgctaccttctgcatcggcttgctgccgggctacctggccatcggcctcgccgcccccatcttgctgctgctgctccgcatgatccagggtttctcggcttccggcgagtatgccggcgctgctacgttcctggctgagtacgctccctcggacaagcgcggcgtgtactgctcgctcgtgcctgcttcgacggccgtgggcctgttggtgggctctacgttcgccacggtcatgtacacgatcctgcctgacgcagccgtgaacgagtggggctggcgcatcccgttcctgttggcaggaccgctgggtctcgtcgctcactacattcgtaccaagctggaggattcgccgacgtatcaggagatgcaggctgctatctccaagaccgacgactcgaatcatcctatccgcgacctgttccgtcatcacacgaaggagctcatcatctccttcggtgccgccatgctgaacgcggtgggcttctacgtggttctcacgtacttgccggtctacctggagacggtggtcatgatgccggcgaacgaatcgtcgctgatcaccactatctgcctggtcgcgtacgtggcgttcatcttcggcatggggcatctgtccgataagttcgggcgcaagaagatgctcatcatcgcctgtgtgtcgttcatcgtgctgacggtgccggcgttcatgctgttgaacactgcgcaattcttcacggtgctggccgtcgagctggtgctgtgcctggcgcttaccatcaacgacggtacgctgtccagctatctgaccgagacgttcccgacggcggtgcgctacaccggcttcgccctgtcgttcaacttggcgaacgccctgttcggcggttccgcctcgttcatctcgactgctctgatcgccgctaccggctccggtctcgcgcctgcctggtacatggtcggcgtgtcttgtgtcgcgctggtggcgatgatactatcgcacgaacatacgggtaaggatctgtccgaagtgtaaggccctgcggtctgcacgacgatagtgctgatacaaacgggcgccgtccagacctgctggtccggacggcgttcgctcatgagacggcgtgctcgcgccgcccgtacaatggaggacgaatggctgaaacatcgcagacgccgaagtctttgaaagctcagatcacgcgcacgtcgctcgtgctggccgcggcggcgttgttgcgcgagcaggggccgaaagccgtgacgtatcgcaaggtggcgaagtgggccggtgcggcctcgtcatcggtcggatattacttcgactcggtgacgcagttgctgcacgaggccggtcgctacaatattcagctgtgggccgagcgtgcagagaaagcggcatcggctgccgaaggccttgagcctgaagagtgtcgtcgtcatgtaatcgacctactcattcgcgcctgcttgcccgatgaatcggtggtgccttcggctcactacgggcagctgattgccgcggccgaatcggacgtggtcaccgaggcttaccagaagggccgcgtttcgctcgatgccgccatcgagcgcatccttgcacgcgcaaagatcgatatgccgccacgtatggtgggcaccgtggtagacggcgcggcagtggccgccatttccgaggggtacgacgtgcgcaagttcgcgtccgatatcctgcgcgatgccgtcgaagtctacatcaaggcatctgaagcttaacgcttgtagcgcgcctcagtaatccagcaactcacgtttcggcgacgggagggtgaacgccctcccgtcgccgttcttctttccagcctgaatggtagaacggatgcaagaaacgcatcgattgcgatgtcgcgccgctgtgttcgcgagcggcgcgacatcgcgtcctaggtgaggaaaggggttgaggcagcatgagcgatactcgtcgcgcaccggaggcgtcttcggctgacgcgggcccggtgggctcggtgagccggccgtcgttcaaacgcacgttgacgttcttcggattcttcgccatcacggcttccatggtgatgacggtatacgagtacccgtcgtttgcgtcgtcgggattccagctggtgttcttcctgatcatcggcggcatcctgtggttcttgcccgtggcgctgtgcgctgcggaaatggccacggtgaaaggatgggaatcgggcggcattttcgcctgggtgggcaatacgctgggcagacggtggggtttcgccgcgctgttcttccagtggttccagatcacagttgggttcgtcaccatggcgttcttcatcctggcggcgctggcctacgtgttcaggtgggacgcgctgtacaacaacccgctggtgatgttcttcggcgtggcggccatcgtgtggctgctcacgctcacgcagctgggcggcacgaagtacacggcgcgcatctcgaaggtgggcttcgtgggcggcatcatcgtgcccgtgctagtgctgctggtgggcttggtgatctacttcgccacgggcggcgtctcgcagatcaagatgcacgcggccacgttcgtgcccgacttcggcaaggtggacacgctggtcatcttcgcgtcgttcatcctagcgtacatgggcgtggaggcttccgcttcgcatgtgaacgagctgaagaacccgaaccgcaactacccgcttgccatgatcgtgctggcaatcctcaccatcgcgctggacgcgctgggcggcttggccgtggccacgacgcttccggcgtcggttctggacggcaacctgtcgttcggcgtgatcgaggcgttccgcgccatcttcgtgcagcacatcggcccgtctatgagctggatcgtgttcgtggtggcgctgttgctggcgctgggcgtgcttgccgagatctcggcgtggatcgtgggcccgtcgcgcgcgctgcttgatacggcgcacgacggcatcctgcccccgtcgttcaagaaggttaacaagcacggcgtgtcggtgaagacggtggtcatccaagccgtcatcgtcacggtgtgggacgcggtgctgtgcggatccatcgcgctgtccggcggatccagctcgtcggtgggctacctgacggccatcggtctgaccgtggtcatctacctggtgggatacgtgctgttcttcctcgggtacttctatctgatcttcaagaagaagaacctgcagcgctcgttccagctgcccggcggcacgccgttcaaggccatcgtggcgggcgtcggcctcatcatgaccgtggcgacgttgatcatctcgttcttcccgtcgtcgaacctggacgcgcagtcgaacgcggtgtaccaggcgacgctgggcgtggcgttcgcgatatcggtggctatccccttcatcatatacgcgttgcgtcatcgttgggagccgaagcctgtcgtgccggtaggggcgacggttgccgcgccttcgggcgctgccatgcccgcgcgtcccgcggctcccgaacagggcgctcatgtccgcaccgatgcgagcacctcgggccccatcaacaagcgcacgaaggcgcgcgacgcgatgggcggcccgcgtgatgcttcgggcacgccgcgatcggccggagcaagcggcgcggttgccggtggcggtctgagcgagcgcgtggcgcagggcatttccagcgtggtggtcggcgtgaccagccgcccgccgggacccattcctgtggacgcgaaggatccgcacggtgcccccgacccgctgcgcacgcctaccgtggacgaaggccgtgcgcacgagatgtcccagcctccggcctgcggcgtgcccacgccgcagaaccctatgccggttccgtgcgacgtctcggacgaggattccgcctcgcggcatgcggcttccagctccggtgccgaacggtctgcggccgatgccgccgacgtgcgcgacgatctgatcgaccgaacggcggaaggcgaccccagcttgcgcgccagcgtgacggagggcgtggtcgggcagggcgttccccaggccgaccccgatacgcccgatccgcagcgcgagacgagcatcgacaccgacaagccggcccgctagcgcgcagcgaacaaccaggtatcaaacttcgaaccaggaggttttcatgaaggaacagacatctaccagcaagattctcgacagcatggacgagggcaccaagtactcgacgcccatcttcggttccgaggcgtccgacgtggccatgccgcgtctcaagatgaacgcccagccggtcgagccgcgcatcacgtacgagatgatcaaggagtacctgtcaatcgagggcaacgccacgcagaacctcaccacgttctgccagacgtacatggagcccatggccacgaagatcatggccgagacgatggagaagaatgccatcgacaaggacgagtaccccatgacggccgacctcgagaaccgctgcgtcgccatgatcggcgatttgtggcacgcgaaccccgacgaggagcccatgggcacgtccaccgtcggctcgtccgaggcctgcatgctgggcggtttgggcatgctgttccgctggaagaagctggcgaaggacgcgggcatcgacatctacaccgagcagcgtccgaacctggtgatttccgcgggctaccaggtatgctgggagaagttctgccgctattgggacatcgagatgcgcctcgtgccgcttgagaaggaccacctgtcgctgaacatggacacggtcatggactacgtggacgaccacaccatcggcatcacggccatcctcggcatcacgtacaccggcaagttcgacgacgtgcagaagctcgacgagctggtggaggcgtacaaccaggatcatccgaagctgcccatccgcattcacgtggacggcgcgtcgggcggcatgttcgccccgttcgtggagcccgacctggtgtgggacttccagctgaagaacgtgtggtccatcaactgctccggccacaagtacggcctcgtgtaccccggcatcggctgggtggtgtggcgcagcaaggaggcgctgcccgaggacctgatcttctgggtgagctacctgggcggcgaggaggccacgatggccatcaacttctcgcgctccgcgtcgcagatcgtgggccagtactacgtgctgatgcgcaacggcttcgagggcttcaaggagatccaggagcgcacgctcgacgtggcgcgctacctggccgccgagctcaaggagatgggcatcttcgagatctacgaggacgcgtcgcacattcccatcgtgtgctggggcttgaaggacgacgccgacgtggagtggtcgctgtacgacctgtccgaccgtctgcgcatgagcggctggctggtgccggcgtacccgatgcccgccgacatgcaggacaccaccgtccagcgcgtcgtggcgcgcgccgacttctccatgcagctgtgcatcaagctggtggaggacatgaagaaggagatggacacgctgaacaaggcgaagttcgtcaccggcaacacccagggcgtcatccagaccggtttcaaccatggcggccgctccgccgtcgacaagggcgaaaaggtgcagacgaaggccccgacgccccagaaataaccgcccgatagcgtgcgtgccgcgcctccgctgcggggacgcggcacgctccgtccgactggttgtgggcgggacgacgagggtgcggcgtggcccgccgatcgttttgcgcccagaatcgaaatccggagcgcggatcgcgcccatctcgtcgctgcccggtcgtcgcggcgcagcccgcccgttgcgccccggcgctggatccccgccgaaagcgggattcggtgtcccttctgcaactttttcgactttatggcaggcgcgtttccgaagtcaacatcctcatcaggcgttttgcggttgcagggaagcgcggcggcggaaggctgcagcagcgtcgggagaaatccctggtcaggttccaccccatttgccacaaagtcgaaaaagttgcagaaggggttgcattccctgcttcgcggctccgacgacaggaagcggggcggcgacctcgtcccttgtcgcgctcttacgagagacgacaagggggcgtcggtcgcgagagcgcggggtcgcaggaatcgttcgcgatgggtttacccgaagatgccgtacatgtacccgaagtagccggccaggccgccgacgacggcggcggccaggaaaagcacgacgcctctgagggtgcgatgctggcgggcgcggcggctgcgcgggttgttgcggtcgatgggctcgcccttcgagtacgctacgagctcgcggtaggtaaccaggtcattctgcttcttgatgcgctccacgcgcatgagcatcgccatgccgatgccccataccaagaggccgatgatggcggacggcacgacgccccaatcccattgggttatgccggcgatggcggctacgactcccacgatcgcgatggccaaacctccccagctgagggcgaccatcttcttgtagtcgttcgcgattgcttttttcatggcttccacgtctcctttgatcagttcgtcgacggttacgtcgaagagaacgctgagcagcagcaggctttccacatcgggataggtcttgtcgttctcccagcttgagacggtctggcgcgaaacgtagattttcgcggcgaggtcgtcttgcgagagtccccgatccgtccgatgccgtttgatctgactgccgagctccatgcgtttcccttcgctgatcacaggttgccatgacgcgccaaagtgtaccatcaaatggtcttgacgaagcctctcccgcccccagttcaccttgtcaaaagtcttttacgttgcgtctgaacagggaaaagccccccgcttcgatgcttgaagcggggggcttgggaggttgcgatcggtcgatgcaagcctaggcgcgcctgcgctttcggaaggcggcgacgacgaggagcgcggccgcgaaggttgcgccaagcgcgactgcggcgaacggggcatcgccggtggcggccagcttgtgcggcgcgtcggtcggggtggggtccttcggcttctgcgggatctcgctcaaggtgttggtcaggtcgtaacccttcacggaggccgtgtacccgttggggacggcgtcctcccgtatcgagtacgcgaactccttcccatccgcgtcgaagcgggggaggtcggcgaagcggtacgcccaatcgcgttgtgcggacgtctcctgcgtgcggaagagcttgtcgttctggtacagcgagacggtgagcgtttccggtcgcgtggtgccggcgttgtcgttgtccacccaggtcttcgtgccggcgacttcgacggtgtcgccgccgggctggggcttcagcgtgttcgcgatgttgtggcccgagacggccgcctcgtagccggccgggacgtccttctcgcgcacggtgtaggcgatctcggttccgtcgtcggcgtacttcggcagctcggcgaacgcgtacgcccaaccgtcagcctccgtggtttccagcaacttcaccacatcgtcgccgtccagcagctccacggtgatgctttcggggcgcgtgttgccggcgttgtcgttgtcgtcccaggtcttcgtgcccttcacctcggctatgtcgttcagcttcgggtcgagcgtgttcgcgatggcggtgccgtcgatgacggtggcgtagtgctcgacggcctcctcctgcacggtgtacacgtggatggcgccgttcgcggcggcttcgggcagaccggtgaactggtacgcccagccgtcgtcggcggttgcggtggcggtgtcgaacagcacgtcgtcctgatacaggttcacggtgatcgccgccgggcgtgtgccgagggcgttgtcgtagtcgtgccatgttttggtgccggcgacgtcgacgcgcttgatcttgttgacggtttgctcgcccggaacgaccaccgtctcgatgtcgccggtgccctggatgttggcgatggggacgaacgacgtgtacccgttcacgggcgtttcggtgagctggtacgttgcccgctcggagccttcgagcagcgggatgttcgtgaacgtgtacgtccagtcgggcgccgacgccgtggtcttgaagatgtagggggcgtgcccgctcgcgttcgtctgcgtgagcgtcagggacacggatgcggggcggtcggcctcggtgtcgccgctccatgttttctgaccggtcaggtagaacttctcggcaacgttgtacaggttggagacgatgacgccgttgtcaaccgctggatcggcgtcgatggtcgagatgtagttgccggtgatgcccgaagcgtcccgaacgggatcctcggtcacttcgtacacgaggtcgttgccgtactggtcggttttcggcaggccggtgaacacgtggtcgaagtcgtcggccccgccttcgctcggctctcctccgatcagcgtccaggtgcccacctcgtcgccgccgcaccacaagcggatggtgacgtcggcgcgcgttccgtgccagtcggggttgtcctgccagtgcttcttcacggggatgtcgatcgcctcgacgggctcgtcgctcgtttgcacctgcacgggcgcggcggtcgacgtgcgatacctagccgtgacggagacgggccccatgatggcattgtcgcccttctcggcgttgatgtcggcttgggcgtcggtcaggctgtcgaacgtgcgcacgacgttgtcgccgcctcggtcgccgtcgagcttgtcgtacgtcacctgcacgcctacgacgtcgtcggggttgctcgatgaaagctccaggtcggggctgagcagggtgccggagccgtccttgccgccggcgaacagccgctcgttggcagaggcgttgacggtttggccgtcggacgtggtcacctgcgactcgccgccgccgaccgaggtggttgcgcccgtggtgccctctacgatggtgaagggaattttcttgtcgttgagcaggtagccggtgggcgcttcggtctcctggaagtagtaggcgcccggaaggaggctggaggtggagaggctgcccgcatcatcggtcgtgcgctcttcgacgaaagcccccttgtccgtgtacaccgcataggtcgctccggccaccggcgcgttggtggtggagtcggtcttggtcagcacggcgctgcttccggctgcggacgcggccgtgatccggtcgtatacgcgaaaggtgggcgtgaggtagtatttgtaggattgctcgccttccgtaatggcgccccactcgtcctgggtgccgtacttcaactctttatccatgccgacgtagatatggaagaccccgcttttctcgaggccggtgaaggcggcggtcgtgtcgttatgagaggcgatgaccatgctggtggcggcgtcgcccggccgtgtgtgaactccgcattctacgacgtgcgcgtcctcgatcttcgcgccatgctcgtatatggccgatttgccgatgtcgagggctccgctgacggcggtttcgccggcggggcgaacgtaggcaaggtgctgggatacgtcttccgagtacgtgaaagaagagcttgccggctgcatgatcttcaggcgtcccccgaagaacgtcgggagcatctcaaaggggttgccgccgaaatcccacaccacgttcctctcgtcgatttcgatggtggggtcgttcgccagcagctcgccatagtacttgtcttcgagcccgccgctcctctcgagccatgaaaagtcgcgaatctcgttgtacttcaggctgacgagctgggcgttgcgcaggtattgaatgccgtgtacgtccttgatcttctgatccgagggcgtcgcgttgctcttgttgtacagaacggttcccctgaaattgtacagcgcttcttcgacgtccgcgccttcggcgccgtcagccccgtccttcacggcatcgaacacggcttggcggaagatcgcgtcgggaacgtacggcaccaattgctcgatgtccgtgatttgcacggtatcttcggcggcttccgccgtcatgcccggagcgacgggcaggcaaagcgcaaggcccaacgcggcgcctatcaacagtgtgcgaaccttcatggcgtaatccccttcgatgctcgataatccatccgccagcttagcatcaacgcaggtcagaacatgcgtgaatcgccagcctcaacttgttgctcaggcgtgcgatcggcgcctcgcggcgacgcgccgcaggcgcgcggcagaagcggcgcggggcgcgaggcgcgagacccggggcacgccgcgtatgccgtttggccacgcggcgcttacggatgacgaagcgcatgatcgatgagacgcgcgcaccgtatgatcgaacgcagccccggcgtcgaggaggagcccacgatgaagaagatcctgattgccctgactaacacccccacgtacggggagaagcacgctgccaccgggctgtggctgggcgaagccgccgagttcgtggacgaggtgggccagcgcggcttcgaggtggactacgtcagcccgaacggcggcttcgtgcccctcgacccgcgcagcatgaagccggcatatctcgaccagcccacattcgcgttgtatcacacgcccgacttccaggagcgcgcgctcgcgcgctcgatgagccccgacgacgtggacgcgggggagtacgccgccctgtactacacgggcggccacggcgtgatgtgggatttccccagcagcgaagggcttgcgcgcctgtgcctcgaggtgtacggcaacggcggctacctcgcctcggtgtgccacggcatcgcggggctgctgttcgtgcaggatcgcggcacgtacctcgtggaagggaagagcatcacgggtttcaccacggcggaggagtacctgagcggcaagagcgccgccatcccgttctggaacgagcaggtggcgaaggcgcacggcgccgtgttctgcaagaagcgcccgttcgcgtcgttcgccatgcaggacggccgcatcatcacgggtcagaaccccgaatcgccccgcgccgtcgcgcgcctgctgttggagaatatagaacgccccctgcgctgaacccggttctcgttcgccatttgggaccggattcagcgcagggggcgcctggggaaggtggtggtcacgcggagcacatcgcgcgcaaccaccggtgatagcggaaaagctttagtcttcgcgttcgatgggcatgctcatgcagcgcgggccgccacggccgcgggacagctcggcggacgggacgatgatgaggtcgaggcccttgtcgcgcagcaccttgttcgtgacgtcgttgcgctcgtacaccacgatcttgcccggggcgatgcacagcgtgttcgagccgtcgttccactgctcgcgctcggccgcgatgcggtcgccgccgccacaggggatgagctcgacgggatgaccgacgtaggtctccaggatgctctccagcgtgccgttcacttccttgaccttgattccctcgcccgcagcggtgatctcgaagacggtcagcgggcccatgatgccgggatggatggtgaacttgtccgtgtcgatctgcgtgaacacggtgtcgaggtgcatgaaggcgcgggagttcgggatgttgaacgccaggatggtctcgatggggctcgtcggatcgttgaagatgttcttcgcgatggcgtcgatggcatcgggctcggtgcgctgggaaatgccgatggccagcaccttgtcgttgatgttgaggatgtcgccgccctcgatgtggaacgtgttgtagcggctgtagtactcaggggtgcccttgagcaggggatggtgcgtgaagatgtactcgccgtagatggtctcgcggttgcgggtctcggagtacatgcggttgatggacacgccgttgccgatcatcgcgaacgggtcgcgggtgaagtacaggttcggcatgggggccacgaccatcttggaggactcggaaaccaggtccaccagcgagttggacttgtcggtgtgcagctcggtgaggttgatgccctccatcgtcttcagcacgaagtccttggcgtcggggtagttctcctgcatgtagtcgaagatgatcttctggtagcgatccgtgcggatgccggcctcttcgatccactgcttgaggaactgctcgcgcagctcggggttggcctcgagaacctcagccatgaggtcttccaggtaaaacacttcgacgccgttgtcgcgcagagcctgcgcgaacgcgtcatgctcctcctgggcgaccttcaagaacgggatgtcgtcgaacagcagctcttcgagcgtgttcggcgtcaggttcagaagctcttttcccgggcggtgcagcaggactttcttcaagggcttgatctcgctcttgacgttcactcctgacatgtgcaaccctccttcttcctttacgtcggttcctcgtgaagggggaaccgatcttcgccaagtcgccgtgcggtcctttaagccgctcggcgcgttgagtccaccatgcacccctcgtcgggcgaatgaaagatgtaaacaagatttagcgatagattgattgcgggtgtagcggagcggcgaacgcggtaaacctcccgtaaaccgcaggtgggaagatgattccctagcggcggccgccggggtgcgcgggcgcgttttcgggcgggggcaacgccgtgcgcgatttcgtgtatcatggcatatgatgcaagccatgaggtaaacgatagcgaggtgctcgttcgtggggttcgtgctgttttactacacgctgttcgtgatgcttgcctctatcctcgcttcggccacgtgcttgtcggcctatctcgtgtcgcatcggcgcgagatgatgttcgccgtgttcggcttcctgttctacttcttcgatgtcgcctgggtgctgcaggacgacttcgccctcctgggcgatttgcaggtggtgggcgtgttcgccatcgtccgctcgctggtgtccgtggtgacgggcggcggctgcctcatggcgttctggctgctgctgtgcgactacctcggcggcacgaaccgcgcgctgcgcgtggtgccgggggtggtgtacgtgctgggcagcatcgcggcgctcacgttgctgcccgacggcaacgtgcagcggttcgtgttctacaccacgcgtgccatgctgctgttctggatgctgctgtacgtcgggttccgttacttctccagcaaagacgaggtggagcgcaatcgtttgcgccgtcatcgatggctctacgtgctggtgtgggtggtggggctgctcatggtcctggaggacgcgagcttcttcttggtgtgcgagccgaactccatcgtcatgtggccgcgcacgttcgtgcccgagcgcaacttcatggagaacgtgctgatgctgagcctggcattcttcgcgtgccgcgacgcgttccaggtgctgtcgatgcgtttcgagcgcccgccgatgcacggcggcgaggtgcaggacgcgcgcatcagcgagaacctcatggtgtacggcaagcgtcaccagctgtccgagcgcgagcaggaggtgctgcacctcgtgctgctgggcaacgacaaccagaacatcgcgtccaccatgcacctggccctgagcaccgtgaaggtgcacgtgcacaacatcctgcaaaagacgggccagcccaaccgccaggccctcacccaggacttctggaagacgtcgtagcgaagcgcgcgccgagcggcgcgcgcttcgtgcttagtcgaactggcgcagcgcggcgctcaggcgcttgaggccctcgcgcagcgtggggtcgggcgcgcagtatcccagacgggcgccgcagggcagctcgaagcggcttcccggcaccagcagcaccccttggtcgcgcagcaggtcgatgcagaaccgctcgtcgtcgatcgggatatccagctcgatgaacgacgtggacacggccttcgggggcacccaggacacgcgcggctcgttgtccacccactcttgagcgatggccaggttgttcgtgacgatggcgcggttgcgctcgagcaccttgtcgcggttgcgcagcacgtgcacggccaacgcgtcgttgaacacgccgtcgcagatcatcgtgtagtcgcggtacacgcggaagcggtcggccagctccttgttcgacaccgtccacccgatgcgcgcgcccggcaccgagtacgtcttcgacaggctgttcgtcacgatggcccggtcgtacaggtcggccatcgacacgtacgattccgtgtcgtgcaggggcaggtacacctcgtcggacaggacgtaggcgcccaccgattcggcgatttccgcgatgcgcttgagcgttgcggcatcgagcacggtgcccagcgggttgctggcgttgttgatgcagatgagcttcgtgtcggggcgcacgagcttttcaagctcggtcacgtcggggttccagccgtgctcgcggcggatgtgccaatactccacgtcggcccccagcgtgcgggggatttcgtacagcggctggtaggtggggtattcggcgatcacgtggtcgcccggctccacgagggccagcagcgccagcaagttggcgccggtcgcgccgttggtttgcagcacgttgtcgggatccgccgagcggtagagcttggccacctcctctttgaacgcgggcgagccctcgatccagccgtagttcatcttctccttgttcagccgctcgtagaacgtggccccttgctcgtcgtccagggcgaggatctcgcccatcgtcatcgacgagatggtggattgcgcgatgtcgtaggtggcgcttttctcccagacgttcagccagtcttcaacgccaatggttgcgatatgcataggagtgttccttcccggttgtgacaggttgcgatatgcggtgctagaagctgatgaatcccgtgaacagcagcacgagcgacagcacgccgagcgccgagatgatgcccatccccgccttctcggccgtcgtcaggccgcgtccttgatccttgcgcgccttggcgtacacgaagaagcccgggatgtagccgacgcaggtgagcagcaggaacgtccagccgttcagcagcacgccgacaacctggaacagcaccgcgatcgcgccgatgaccagctgtcccatctgcctgttctgggcggagtacttcgcttgataggccgctgccagggtccaggtgatgacgatggccaccgtgcagagggagaacgcgaagttgtacgcgtcttcggagaagatgagcgtgagcatgaacacctgggtgcacgcgcccacgatcagcaggctgaaccggggagcgttcttggcgttcatcttgccccacgcggcgggcagcagctggcgtttcgccatgtccgacgtggtttcggcgggcaggatggtgaacgacagccacgaccccatgacggagatgatgatggcgatggagatgaacgcgccgccccagccgggggccatcgagtcgaacacgtagagcatggccgggtagttcatggcggcgatctcggtgtagggcaggtagccgtacggcagcaccgaggcgctgatgtagatgagcagcaggcagatcaggccgatgacggtcgccttgcccacgtcgctcttcttgcgggcgcgcgaagacatgacggtggctccctcgatgcccacgaaggtccacatgaggatgatgaggcagttcttcacctggtcgccgacgcttccgatggccaccgcgtctgcgcccagctcgcccatggaggccatgttgttctggagcgtgccccagaagtcggccgtgaacacgttggcgttgaacaggaacagggtgaacaggatgaacacggcgatggacgccaccttgcacaccatgacgatggcgttgaggaacgatgcgctctcgacgccgcggatgacgagcagggtgagcagccacatgatgaccgacgcgatgaggatgcagggaacggtgttgcccggcaggaacgcggggaagaagtaccccagcgtcgacatcatcatcgtggcgaaggcgacgttgcccagccacgcgctcagccagtacccccagcccgagatgaagcccgcgaacgggccgaagccctcctcggcgtactggaagatgccgtgcaggtcggggcgcttcgcgcccaggttggcaagcgacagcgccagcatcatgaagcccacgcccacgacgccccaggctatgagcgcgctgccgggagacgcgacctgcgccaactggcccgtgatggcgaacacgcccgacccgatgcacgagctgatcaccatgccgatcagcccgaacaggccgatcccttttcttttgtccattgacgaactcctttgcgaagaggtgctgcatgacgacgcgtcgatcacaccttgccgggaggcgacggcgaaagaaaggtctaaacagggtctatcgagcggcccgcgcgcgtccgaaatgcggcgactgagaactacaacctagttaaaccgcaggtgatcggatgcatgcaccgcaggggcgtaccgtttcgtatatgatgggaaacgattgatttcctgcatcgtcggacgaaggagtgtctgttggtggggttcgtgctcttccatttcaccctgatcgtgctgctggcttccgtcctcacctcggctgcgtgcctgtcggcgtacctcgtgtcgcgcaagcgcgtgctgctgttcgcgttcctcgcgtttctgttctacttcttcgacgtggcctgggtgttgcaggacgagctcatgtatccggggctcgatgcgcagatgaccagcgcgtacctgatggtgcgctcgtacgcgtccatcctggcgggcgctgggttcctcgtgtcgttctggctggtggtatgcacggtgctcggcgagaagagccgcgcgctcatggcggtgcccggcgtggtgttcgtggtggcaagcgcggtggtgctcatcgtgtttcccgaggggaacgtgcagcgcttcacgttctacaccctgcgcgcgctgctgctgttctggatgctgggattcgccgcgtatcgctaccgcacgacggacgacagcgtggagcgcgggcgactgcgccgccacctgcgcctgtacgtggcgctgtgggtgctcggcgtgttggtggtggccgaggacgtgctcttcttcctcgtggtggatccggcgacgcttggcatcgggccgtgggcgttcacgtccgagcgcaactacgccgagaacgcgttgatgctcgtctgcatgttcgtggcgtgccgcgacgcgttccgcacgctcgcgttgcgcttcgagcatccgccggcgccgggcggcgagcgccgcgaggcggtgctgaacgacacgctcatgcggtacggcaagcagcatcagctgtccgagcgcgagcgggaggtgctgtacctcgtcctgcagggcaacgacaatcagaacatcgcctcgtcgttgcagctgtcgcccagcaccgtgaaggtgcacgtgcacaacatcctgcaaaaatccggtcaggcgaaccgtcaggagcttatccgggacttctggaggatgtcctagaaggggttcggctccctttggggcatcggggcgccgcgcttgctacgacgggcgctcggccagcgcgaggttgcgctggaggacgccttcgcccagcacgttgaggtagctgtcggcgagggcgaccatggtgtcgatggactcgcggcggtcgctggccagccagcttttcagcatgctgacgatgccgccggcgatgaagtcgaactggtagttgcacagcgccatgccgagggcgcggtcgcggttcggcgtcaggccctggtcgcgctcccggcgctccacggcctcgaggggcgcgacggccgtgaggcagctgtcgcgcaccacgtcgatgacgtctcccaggaaggccccgtcggcgttgtcgccgaacacgatggcgaacgcgtcttcgttcgtttcgaagtagctgaaaatgtcctcgaggaacggacggttctcgttgcgcgccagctcttcgccatgcgcgtccaccagctcgcggcagatgttgcagaactcctctttcacctggtcgaacatgtcgtacacgtcctggaagtgcacgtagaacgtggcgcggttcacgtcggccagctcggccagctcagtgacggtgatgcttttgagcgggcgctccttcaaaagcgccatgagcgccgtcgtcagcgcgttgcgcgtgcgccgagaacggcgatccattttgatgtcgcgacgccatccgggtgtcaagatttcttccgacacgattcaccttcttcgacgaacagcccccgcggtgtcgaatagtcgacgatcgggcgcttgattgcgtattgccctggtcgaaagcatatcgcatactcgttcattattcaacacatgatgtataacggtactaatgttgagtatgcatcacctgtggtatgagtgtttcacgtgaaacatctgttcgaagggagcatgatgctcaagttttgcgaagcgttcctgcgccaccgcaaggcggtggttgcgctgttcgcggtggcggcagtggcgtgcgcgctgtgcatcccggcggtgaaggtgaactacagcatgaccgattacctgccggccgacgcgccgtcgatacaggcgctcgacgacatggagcagtcgttcgacgggggcatcccgaacgcgcgtctgttcgccgagggcatcgaccaggccacggccgagcagctttcccgcgacctggccgccgtcgacggcgtggacgaggtgatgtggctgggcagcgtggcggacacgaagaagccgctcgccgtgcaggacgaggacgtgacggcgtcgtgggcgaccgacgacgggtatctgttccagctggtcatcgacgaggcgaaaggggtgacggccaccgaggaggcgcgcgcggccgcccaggatacgggcgcgtcgcaggtgtcgctgtcgggcgatgccgtgaacaccgccagcgcgcaaagctccacgtcggtggagatcgcctacatcatggtgctggcggtactcatcatcatcgtgatcctgtcgctgacgtcgcattcgtggttcgagcccgtcatcttcctgacggtgatcggcgtggccatcgtgatgaacatggggacgaacctcctgatcggcgagatctccttcatcagccagatatgcggcgccatcctgcagctggcggtgtcgatggactacgccatcgtgctgctgcacacgttccgtcgctgccagcgcgagtacgccgacccctacgttgccatggcgcatgcgatgaagcgcggcttctcggtggtgctgtccagcgcggccgtcacgttcttcggcttcctctcgctcacggtcatgcagttcggcatcggcgtgaacatgggcatcgtgctggcgaagggcatcctgttcagcttcctcaccgtcatgttcctcatgccgtgcctcacgctgctgtgcctgcgctggatcgacaggttcgagcaccggttcctcatgccctcgttcgacggcttcgcccgcgtgtgccagcgcatcatggtgccgatggccgtggtggtgatcgtcgtggcggtgccggcgtacctggcggagagccgcaccgatttcaggtacggcacctccgggttcgcacctccgggcagccagaccgcggttgagcaggagcgcatcgaggaggcgttcggcgcgtcggccacctgggtggtgatggtgcccgagggcgacacgtcgcgcgagcaggcgcttgcggacgatctcgaggcgctcgatcacgtgacgggcgtgacgtcgtacgtgaccgaggccgggcgcgcgctgccggtggaggttgcgcccgcgtccacggtggagcaggtggtcgcgggcggctggtcgcgcctcgtggtgtcgctcgacgtggaaggcgagggcgacgaggcgttcgcgctggtggagcaggtgcgtgcgacggcggaggctcagtacggggacgcgtaccggttggcgggtgcggaggtgtcggtgtacgacctgcgcgacacggtgcagcaggacgcggggcgcgtgaagctgttctccatgctgtccatcggcctcgtgctggcgctcatgttccgcagcctgtccatcccgttcgtggtgctgatcgccatcgaggtggccatctggatcaacttggccgtgccgtacttcctgggcgacagtctgaactacatcggctacctcgtgatcgacgcggtgcagctgggcgcggccgtggactacgccatcatctacacgcgcgagtacttcgaccgccgcagcgagtacacgccgcgcgaggcggcgcgttcggcggtgaagcatgcggccctgaccattctcacgtcgtcgtcgatcctcgtgttcgcggggctggcggtgtggcagatcgcctcgaacggcgtgatctccgagctgggcgtgctcatcgcgcgcggcgcgttcacgtccatgctcatgatgttcgtgttcctgccgtggttgttcaaaacgttcgatggagtcattcgccgcacctcgctcggcctgcatgtgtacgagggcgagccgaagggtgcgagcgcgttggaaggagaaggtgctcatggagaagcgtaaggaagcgggatgtgcgctggcggcctcgctgctggccggcgcgctggcgttgccgacggcggcgttggaggtgagccaagcatggggcgtcgagcccgaggcggcgaaggacgaggtggtgtacgtgaaggcgggcgccgacggggcgacgcaagggctgtacgtggtgaacgtgttcgacacgggctccgtccagacggtggacgacccggcgcgctacacgcgggtgaagaacctgaccaccaccgatgcgctggtgcaggagaacggcgccgtgcaggtgagcacgttggctgatcagccgttctattacgagggcgagatggacgccgcgacgccgctgccgtgggacgtctcgttgacgtactacctcgacggggcgcagatcgcgccggacgagctggcggggaagagcgggcggctgcgcatcgagttcgcggtgacggcgcgcggcggggatgcggaggccgcggggctcgcggacttcgccgaaagctgcgtcatgcaggcgcaggggacgttcccggaaagcgcgttcaaagtggaggaggccgaaggcgcgaccgtcgcccacgtgggcgacaacgccgtgatcagctacctggtgctgccgggcgagagcgccgtgtacgccatcgagggcgatgcgcgcgccttctcgtacgagggatggcagatcagcgcgatgccgctcggcctggccatcgatctggccgaacaggacaccgcgcagctgtccgacaagaccggcgagctggaggacgcaactgcgcagctgtccgacggcgcggcctcgcttgaaagcgggctggggtcgctggccagcggttcgggcgatctcgcgtacggcaccggcgaggtggcggcgggcgcgacggagcttgcgggcggcgccagctcgctggcgcgcgggtcggaggagctgcaagcgggcgtgggcgcggcggtggacgggctcgcgtcggtgagcgcgaacagcgcggcgctcgacgcggcggcagagcgggttcgcgcgggggcggccgacctcgacgcgggcgtgcaggcgctgcgggcgggcgaccagtcgttcctcggggccgtggcggcggcgaaggcccaggccgccgtcggcgccgcgcagtacgcggccgcacaggaggcgtacgcggcggctgcggcggcggcgtacgccgatccgacggctgcgacggtagccgctttggacggcgcggtgcaagcgcttgcccaggccagccaggccgccggatcctacggcgcgctcgacaccgtcgagggaagctatgcgccgctgtcgggcggcatcgccgaggcggcggcgggctcggcgagcctgtcggcgggcacggcggaccttgccgccaacgtggaggcgtacgccggcggcgtcgatgcgctcgcgacgcaggcgcctgcgcttgctgagggggctgcgagcttgagcgcgggcgcggtatcgctggcgggcggcacgggcgaggtggcggcgggcgcgtcgtcggcggctgcgggggtcgcgcagctggcgagcggcgcagcgagcgcctcgtcgggcgcgcgcgagctgtccgtcggcacggccgacctcgccgaggccgtgagcggcatggacgagcaggtcatcgacgcggtgcagcaggcgatcgacgacaagctgggcgccgactaccaggcgcactccttcgtcgacccgtcgaacaccgccgtcgacgacgtgcagttcatctacgtggtggacggcgtggaggagcccgacgacgcggacgcggcggaggcggcgggggaggcgaatgcggacgcggacgggggcgcagacgcaggctcggagccgcagggcttcgtggatcgcctgctggccctcttccgtcccgcaagctagaaggagcggccccccctgccccacgacgggcggggcggggggcaggcgggctggcgggggcttgccgcgagcctagttctccacgatgaggttttcggcgatgcttttgagcttcttgaaatcggtgatgaccagcgcgccgcgttggcgttcggcgcaatcggcgttgcgcagcgccacgacggagttcgtgatggagttcacgtgcacgcccagcatctcggccagctcctcgttgctgaacgggatgatggccggcgcctgcgccgagttgaactcgcgggccagcgtgagcagcagcgcggagaaccgctgcagcacggggtacacggaggcgttcaccgcttcgcgcgtttgcagcgacatcatctcgaacaggtattgcgccatggcgtagcacacgtcgccgtgcgttttgaggtaggagccgaaacgctcggcgtcgatggcgaacgcttcgactttcgtggtggccttcgcgttcaggatggacggcttgcggtcgacttcgggacggaatccctggaacccgatgagcgtgcccgccttgtggaagaacaccgttttggcgtacccgtcgggcgtgccgctgtacagccgtaccaggcccctcgtcaggtaaaacgtctcgcgcatgtcgtcgccctcgcggaacaggtaatcccccgggctcagcacgagcgcccgagccttcagggtgccgtcggcgacgatgcgttcgatggtctcgctcagcagcggcttcggctgcacgaacaggctgattgcttccatgcgttccccctagcgcttcggcttccccttcgtgttcggatacatcataccccacgcgaccagacccgccccggcgaccgccgaggttgccagataggtcgcggaaaccggcaagccgccctgcatcatggctccggccagcagccctcccgcgatcattcccaggtcgagcgcgctttgctgccgcgccaggaacgtgccggcgccgccgcccgacgatgcgcccgcggcggcgacgagcgtggccgtggcgccgaagtatcccgctccgcacaggaacgcccccgcgaggaccgcttcggggctgcggcccagcgccatgagcagcagccccaggccgttggcggcgatggtgcagcccaccgagcgcttcgcgccgaaccgatcggtcgcccatccggcgacgaggctgccgacgaggcctccggtgctgaggaacgcgaacagcatgccgtcgttgcaggatgcgagcgcttcttcggcgagggtctggccgaagttcatgaccacgctgtagcccgacgcgagcaggagcgggctggcgaggaggagcacccgctggcccaggggagaggacgcggggagcgcgaggggtgcgggagctgcgagccgcgaggctgctgccgtgcggtcgcgcggcagcgcgagggcgacggccgtgccgcacgttcccacaagcgcgagcgcgacgaagaacgccccgtacccgtgcgcgtcgatgagcgggaagatggtcaccggccccgccatcagcgaggcggtggttgcgaaccgcacgattcccaaccgcctccccagcttggaggcgggggaggtggctgcgaggtactgcgccacgctcggttggaacagcgccagcccgaacgcctgcgccaggcgcaggaccacgacctgccacagctcggagcaaccgacgagggccaggcacggcacggtgtaccccaacgctcccgcgatcatggcgaagcggcttcctcgctgctccaccacgcgctcgagcgggatgcgcaggaggacggcgagcagcacgaacaggctgttctgcaagctggcgacgaacggtccggcgccaagcgacatgacgtaggtgggaagcgcggtcgtctcggtgttgttgagcccgaacaggaggaaggccgcaatggcgacgagcgccgtgacggcactcgatgatcctgttgcctgcgtgcggctcgggccgctccgttcctcgtcggcgcccatggcgtcccccccctctgcgcaggagatggtacggcttcgtgtacgcgcctgtccaaccagccctgtgccagccccacaatgttgtgggtccaacccctgtttaggtgcgcagcccaaccgtgtgccgctcccactgccgtgtgtggagcgcgttccgaagccggcgtatcgtccagcttgtccgcaagaatggccccaaaggcgcctgtcccctttgggccttctttggggccatcggagaagacgaggaagaggagggtgagatgaagacgaccgatacgcatgctggcgcatgcgaacccgagtacttcatgcgcgacggcaagctgacccgtcgcacgttcatcaagggcgtcggcgcgataaccgtcgcgtccgcgctgggtttcggggcgcagggcaccggcgcgcccgaagcgctggccgacgaggctccggcagccgccggcgagaaggccgtgcacgcggtgtgcacggtgaactgcacgtcgcgctgccatctgcgcggcacggtgcgcgacggcaagctcgtgcgcgtggagccgggcgacatgccggggcggccggggtacgccaacgcgtgcctgcgctccatgagctacatccagcgcttgcaggacgaaaacgcgcgcgtcatgtaccccatgcggcgcacgggcgagcgcggctcgggcgagttcgagcgcatcacctgggacgaggccatcgacgcgatcgccgagaagctcaacgccgtgctggccaaagacccgcaggccgcttcgttctactcgttcacaggcgacctgggcaagctgtcgtgggaggcgcccacgcgctacgccgccaccgtgggagccaccacctgggacatcgagggcatcatgggcgatcacggcgcgtccatgggcatgaccatggtgttcggcacgcaccgcggcgcgcacgactcgcgcgactacctgaattccaagctgctcatcgtgtggggccgcaacgtggctgatacgcacacgtccgagctgcgcgattacgtggccgcgcgcaagaacggcgcgaaggtcatcgtcatcgacccgcgccagtgctccacggcggccatggccgacgagtggattcccctcaacccgcaaaccgatccggcgctggccttgggcatgatgaactggatcatcggcaacgacctgcatgcgaaagacaagctggtggaggaatcggtcgccccctacctcatccgtgaggacgacggcacgtacctgcgcatggtggacggcgaggtggtggccacggcggcgggaaccgggaaggccgacgagggttccatcggcaccgctccggcggcgcagggcgaagcgggcgccggcgccggcacgtacgtgatctgggacgaactgacgggcgccgcggtgcccgcccccgatgcggcctccatcaagggcggaagcgtcaagcccgcgctgacgggctcgttcacggttgacggcgtggcgtgccgcaccgcattcgaccacctcgtcgacgcgtgcgctccgtacacgctcgagcgcaccggcgaaatctgcggcatcgacccggacgtggtcgaacgtctgtcccgagagtacatcgaggcgcagcccgccggcatccgcatgggtcagggcatgcagcgcgtgtaccattcctacgcgccgttccgcaccgtggccacgctggccatggtcgccgggtacatcggtgtccccggcggcggcgcgtcgcatgcgggcggcacggccactaacaagccggttgccggctacacgggcccggtgtacgacttcaccgattggtcggacacgggaaagaaggcgaacctcgtgccgtcctccaaggtgtacgcggcggcggtgaaccacgatccggtgcccatcgacttcctgtggatcgccaactcgaacttcatcaacatgagccccgattccaaccgcatcatcaacgaggtcatcccggccatcgacttcatcgtcaccgtcgatccgtggtggacgtggacggcgaagtactccgacatcgtgctgcctgcctgcacgtattgggagcactgggacctcgtcgaccgcagcccctgggccatgttcaaccagcccgccatcgagccgatgggcgagagcaagtccgacgtcgagatcatgtcgctgctggcgaaaaagaccggcgtcgaggattactggagcaaaaccgacgaagaatggattcgccagttcgtgggcaccgaccatccggcatgggacggcctcgattgggatcgcgacgtggtcgagcagggcatcttcggccgctccgacgcgctgtacgaccccgccatcgtctacgccgacggcaccggctacaaaaccgacaccggcaagttcgagttctacaccgagtccttggtggcgttcgacgaggaggttcccacgtggcaaccgccgtgcgaggacccgcgcgaaggcgagctggccgcgaagtacccgctcgtgtacatccagtaccacgaccgcctgaacgtgcacacgcagcacatcctgaacccggcgctcgaggtggtgcaggacgagcccctgctgcagatgaaccccgtcgatgccgaggcgcgcggcatcgcgcacggcgacgtggtgcgcgtgctcaacgatcgcggcgacatgaagatccgggcgttcctcaccgagggcatcatcccgggcacggtggccacgcagagcgggtggacgcccgattacttcatcgaaggctgctaccaaaatctgacccatcacaccatctgcgacgccgaagaagcctacagcatgacgaacagcgccttctatgacgtgctcgtcgaagtcgagaaggcgtaaaggaggagatcatgaccgaaaaacgttacggcatggtgattgacacccagcactgcgtgggctgccaaacctgcacggtcagctgcaagatatcgaacgaggttcccggcagcgcgcactggaaccacctggaaagcctggacggcgacgtgctgtaccaatcgacgggcacgttcccgcgcaccacgctggccttccggccgctgttgtgcaaccactgcgagaacccagcgtgcgtgaacaactgtccgtcgggggccatgcacaaagaccccgctaccggcatcgtgtcggtgaatcaggacgtgtgcatcgcgtgcggctactgcagctgggtgtgcccctacggcgcgccgtcgatgaacgacgtcgaccacgtgatgagcaagtgcaccttctgcgccgagcgtgtggccgagggcgtcgagccgtactgcgtggccgcgtgtccggcgaacgcgcgcgtgttcggcgacttgaacgatccggagagcgcgccgagcaagctcatgcaagagcggcatgccgaaccgtacctgccggaggccggcacgcatccgtcggtctactatatataggaaagaggggatgaagatgtttgctgaaatgcttcccttgctggtgttcacgacgttcgccggcttggcggccggagcgtacgcggtcgatgccctgtgcgggaacgggcgcgcgggctcgggggccgccgctcctgcgcgcccctggctgttcccgctcgtgtgcctcgtgttgctgggactgggcctgtgcggcacgttgctgcatctggggcagcccttgcggttcgtgaacggcatggcgaaccccggctccatgatcgcgcaggaggcgtactggtccatcgcgttcggggcggtcatcgtcgtcgatcttgcggtggcgaaggcgaagggcgccgcggtgcgtccgatccgctgggccggagggctggttgccgtggggctcatggtggtcacgggactggcgtactaccagagtttgggcctgccggcttggagcggcgctgcgactgtgcctctgttcctggtgggcgacctcgcgctgggcgcgggtctgtgcgcgctgctcgaccggtcggcgctggcgggcggcgtcctggctgcggcgaacgtggccgccggcgttgcgttcgccgcggtgctgggcgcgttcgggctgcatctggcgcgcatcggcctggacgcgacggggctgctggttgccgccggcatcgtggggccgctggccgcaagcgccgtggctgcggcgacccgcgcgggaaagctccccgcgcaggcgggcggcgtggccgtgtgcgcccttgcgatcgtgggcgtcgtgctcgcccgctacgccttcttcgccgcgggcatgatgtaggttcgctggcgtaccgaggaagggcccctctcgcagcttggcgagaggggcccttcgtgtcggaggcgtccggaggggaggaggggacgcctcgcggggggaggcgcttacaccgcagcggcggcgttcttgccggccaggcggccgaagctgagggcggtggccaggctgatgccggccacgaccacggggtagtccacctggaggcggcggcccatcgtgttgccggccacgtacaggccggggatcgggtcgttcgtgccgtccttcgtcacctgcaggtcgtggttgcactcgaggccgccgaacatgaccagcatgcccgcgttgccgaacttgcacgcgtagtacggcgggttctcgacggggaacatgcgcttcgacatcttgccgaaatcctcgtccaggccgttgtggcacagctcgttgtagcgctcgatctcggccttcatcgtgtcgtagggcaggcccgtcttctcggccagctcctcaagcgtgtcgcatttgacgtcggccgcttcgtccaccatagcctgcgtcgtgtagcccagaccgaagccggacagcacggtctcgtactcggcgatcttgtcgtcgggaacgaagtaggtggtgtagccgtggccgtcgggcatgtggatgatctgctcgggccacttgctgtcgaagatctgccaggacttcacgcccgccttggcaagctcggggtccttggcgaccggctggcgcgtgtgctcgtcggcgatgttctggccgggcacgtcctcgttcatgaagcgcttgccctccatgttgagctgcaggaagctgtccacgcccagggcgccgcccatgtggtgcgtcatcggcgcgtgggggcccagctccatccaaccgccggcccagatgcccatgagctggccgcggccgtcatccacgccgcccatgaactcttcggtccacggcgcgtagtagtggcgcatctcggtgttcgcgccgtagtcgccacagcacagcacggtggctttggcgttcaccttgaggtagccgtccttcgtcttggcgtaggcgcccaccacggcgtcgccttccttgatgagctgctcgccctcggcctcgtagatgagctcggcaccggcggctagggcggcgttgaaggccgcctcgcacgcccactgcatgttggggttcgtggtgatggtgccgtggaagtacgggtacacttcttccttgtagtcgtacgtttccagcttggggaagcacttcgggcggatgaagttcggcttgtcggtctcgcggttggcggccgtggacttcagcacctcgtagtcggcgccctcgatgaaccagtcgaagtcctcgccggagtggtcgtaccagtagctcatcatccacgtgtcgcagcgaccgccggtctccttgacgtactcgttcatgatgtcggccttgggcgcccattcgatgcccaggtccttctggatctgcgagcccaccacgccgaagtcgccggccatggagatgacggaatagctgtcctcgggctgcttctccagcacgatgaccttcttgccggcctcggcggcttccttggcggcggcggtgccggccaggcccatgccgatgacgaggacgtcgcagtccttctcctccttgatgtcggtgggaacctccggcggcgtgaggaagtcgggggtgtagttggtgggggagacgctcgacgctgcggcgctgcccgaaccgccgttgccctcggccgacgcggtgccggcaccctgctgcggtgcgcagccggcaagcccggcggctccggcggcgacggccgcggtggcaccgaggcccaggaatgcgcgacgactcagtttggtttctttcatgtccctctctcctttcgatgagaagcgcgacggccccagaccgcccgcttcatcgtgaggatttccgtgacggaatcctcccctgcgccaccaaccatacgtgcctgcgtgctcgcctgccatacctccgcgcgggtagtttttcgcatttcccccggtgaacgccctacctgatacgggtgggtagccgaggtgggacgcgaaaaaccgtcgatcggacggcaaaccatgagcaaaagacgaattgatggggatgggatatactggcagggaaacagacggagggtaggggccgatgagctgtttgaaggatttggttgcgggcatgcgggcgcgcgatgtcgtgttcatgagcgggtatgcgctgtatctgacgttcggctacatgtcgttcgagtcgccgacggtgctcacctcgctgggcgagtcgggcgccctcgtgcagtcgctgttcctcgtggcggtgatcgcggcgcgcatggtggtgtacgcggcgatgatcgcgctggcgcggcgcgcgggccgcgggtttccgcccgcggtgattctcgtgtgcgcgggcgttgcggccacgggcttcatcgtcacgcgcatggcgttccagttcgcggggttcgtgccgttggacgagctcgtgccgtggctggtggcgggcggcctgtgcttcggcgcgggcgacgcgctgatcaacctgctgtgggcgcgcttctcgggcacgttcgacctgcggcgcgtgtacctgttcgtgctgatgagcagcgggctcagcctggtggtgtacctcgtggtgacgctgctgccctcggcgctcatgctgccggtgggcgcggtgctgttcttcgcgtccgtggtgttctgccgccagtgcctcgccgcgcgcgagcccatcgccgaagagtactcggcaccggtgttcaagggcgcgctgtccgcgctgtggcgccccgtgctgggcaccgccatcctctcgttcatgagcggcctcatgctgcagctgtcgctgtcggaggccattccgctggggacgttccagtccacgtccctcatcacgcaggccatcgtcatcgtggcgctgctgctgccggcgctgctggtgaaaagccagcccagcttgggatcggtgtaccgcatggcgctgccgctgtcggcggcgggctttctgctgctgccgctcatctggaacggcgtgggcggtctggcgaacgcgtgcgcccagctgggaacgctggtggcgggcatcatcctgtggtgcatggtggcgcataccgtgcacgacacgaagctgccggcggcgctgctgttctcgtgctcgctcatctgcacgaacgcggcgcagatggcgggaacgctggtgggcatgcttaacgcgcacacgctggggcagggcgacatcacgctgacggcggtggcgctcgtggccatctacctgctggcgatggtgtcgatgttcctgttcaaggacaagaacctgcgcggcgtcgacgtcgtgcccgagggcggcgcgcccacggccgagcagcagggcgatgcgctcgaggcgcggtgcgcgcacgtggccgagacctacggcttcacgccgcgcgagtcggagatcctcgtgcacttggggcaggggcgcacggcgcgcgcgatttccgagaagctggtcgtgtcggagaacacggtgaagtaccacatcaagtccatttaccagaagctcgacgtgcattcgcgcgacgaggtgatcgacctcatcgagcggtcggaatgcgtcgtgccgcacgactcggccgagtaggcccgcgcgcgctgcgaccgccgaaagccttggccgctctataagcccagcgtatacgcgggacctttattctgctaaagtacaggcatcgtaatggggaaatgcgggcgcgttcgcgtccgctgactgagagttgggaaaggagtgggtatgagcagttctatcgctcagaagttcaagaacatcggaccgggcgcgctggtcgctgcgggcttcatcggccccggcaccgtcaccacctgtacggtttcgggtgcgagctacggctataccatgctgtgggcgctgctgttcgccacggtggccaccatcatcttccaggagatggcgtcgcgcgtgggtatcgtttcgggcaagggtctgggtgaaaacatccgcgatcgtattcctaacaagacgcttatgtggattgcaatcgtgattgttatcatcgccatcttcgtgggcaacatcgcgtatgagacgggcaacatcacgggcggcatcctgggcatccaggccgtcacgcccgacatcccgatgatccccatcgtcgtggtgctgggactgctggcgttcgccgccatgtggattggctcgtacaaggtggtcgaggtcatcctcaccggcatcgtcgtgttcatgggcgtggtgttcctcgtcacggcgttcgcgtcgagccccgactggggcgccatcgcgcacggcctgttcgtgccggcgctgcccgaagagggatcgaagggcatcctgaccgcggtgggcctcatcggcaccaccatcgtgccgtacaacctgttcctgcatgcctccggtgcgtccgagcgcttcaaggaccccgagcaggtgtccgacgcccgcttcgacaccatcctgagcatcggcctgggcggcatcatctccatggccatcctcgtgtgcgccgccgcgaacatctacggcaccgagaacgtggtgacgaacggcaaggacatggcgctggcgctgcagccgctgctgggctcgtgggcaacgtggctgatcggcctgggcctgctggctgccggcttctcgagcgccatcacggcgtcgttctcggccgcgtacgcggtgaacggcgtgctgggctggaagaagacggtcaaggacctgcgcttcaagatcatctggatcatcgtgctggtggccggctgcgtgatggccgtcgtgctgggcaagagcccgaccgagctcatcctggtggcgcaggcggcgaacgccatcctgctgcccatcatggcgttcttcgtgctgtactgcgcgaacggcaaggacctgggcaagtggaggaaccacgcgttcgcgaactgcgcgggcgtggtgatcatcgtgatcacgctgttcatgtgctggcgcaacatgtccagcttcatctcgtcgctgcaggcgctggtaggcgcgtaggcgcgacgacggtgccgatgaggttatgagcgttcgtgcgcccgccggtttcggcgggcgcacgtgtttcgagggaggttgaatgtggacgaggcggcgatgcacgaggcggtggggcggctggtgtcgttcctggtcgaggagcgggtggagcttgccgggctggcggtgccggacgaccctgccgagcgctgggcgctcgcgcgctcgctcatgaacatgcggcttccgcgtccggtgcctgtcgcggtgttggaagagcaggatgccgtgctgcgcgcgctgatcgcgcgggcgggcgtgacggacgcgagcgcgctggcgccggtgggcgacggcggcgtcgacgggcggctggcgctgtggcgcggcgacatcaccacgctcgcggtggacgccatcgtgaacgccgcgaacagcaagctgctgggctgtttcattcccgggcaccactgcatcgacaacgccatccacacgttcgccgggatgcagctgcgcctggtgtgcgacgagctcatgcgcgcgcaggggcacgacgagccggtggggcgcgcacaggtgacgtccgcgttcaacctgccgtcgcgcttcgtggtgcacacggtggggccgcaggttcccaccggagagccgaccgccgcgcaggaggagcagctggcgtcgtgctaccgcgcgagcctcgacgccgcggccgctgcgggcgtcgcgtcccttgcgttctgctgcatctcgacgggcgagtttcgcttcccgcgcgagcgcgccgcccgcatcgcggtgggggaggtgcgggcgcggggaggggccgccgcgcgctattcggcgcggttgctttcggtaatatgtttctttattggtaacagttgacttggagccaactcgaagaggtactatgacctcaatacaacaagcaggtgagaaggagcaagcatgactacgatcaacgagcaagcgcaggcctaccgcaagcgtctcttccccgggttcgattcgccgctcgcgagcaccgatcccgagttcgtcgagcgcctcgatcgcttcgccttcggcgaagtgcccgccagcgacgacctggacgaccgcacgcgcatgatggccattttggcatcgctcgtcggcgcgcaggcaatcgacctgttcaaggccatggcgaaaggcgcgttcaacgtgggcctcacgccggttgagatcaaggagatcgtctaccaggccacgccgtacgtggggatggggcgcatgctgccgtttctgtacgcggtgaacgagctgctggagcatcgcctcgtgtcgctgccgctggaggggcaggccaccacgaccgaggacacgcgcctcgaagccggcgcgcagaagcaggtggacctcttcgggccgcacatggtcgacttctaccagtcgggtcccgaggaaacgcgccacatcaaccgctggctggccgagaactgcttcggcgactactacacgcgcacgggcctcgacgacgcgcagcgcgagatgatcacgctgtgcttcctggccgctcagggcgggtgcgagccgcagctggtcagccacgcgcaggcgaacatgcgcgtgggcaacgaccgcgcgttcctcatcaaggtggtgtcccagtgcgtgccctacatcggctacccgcgcagcctcaacgcgctgcgctgcatcgacgaggccgtcgaggcgctcgaggccgacgccgaatagccgtgcgctagccggcccgtcatagcgcccgtattcgcccgaatacgggcgctcgcatgcttccgggcgctaagcctgacgctctaccaggtcgatcagctcctggtgcgagtgcacgtcgagcttcgcgtagatgtggctgacgtgggttttcaccgtgttgtacgacacggtcagctcgtcctggatgaagcggacgttgcgtccgcgcgccaggtactcgaaaatctcctgctcgcgatcggtgagcccggcggccgtgccgatggccgcgcaccggtcggcgacgggggacagcgggccgtcgcccgcgcttgacgacacgagcggcgtgagcggcttgatgccctggatggtgtgcgagaagctgaacgatttctgcacgagcaccacgtatgccacgatgccgaacacgatgcaggccgagatgatggacgtcgtggtggcgtcggccgccatctcgttcgtgaaccgtccgaagttggcgcccagcagcgtgccccatgacgccatggcattgccccaggccagcatcggcagcgcgctcaccgtgttcttcgcccccagcgcgatgagcacgaagtacatgagaatctcgaagaaccccgtgccgcacgacaagagcgtgctgatcagcgtgccgttcaccgtggcgatggacagcacgaggaacccggccaccgagcacaggatggacagctggaagaacgcgtcgggcgagaaatccttgcggctgagcatcacgtatcccagcaccagcacgagcggcgccaacgcgccgagcgccagcagcggtacgcgttccacctccccgaacgtgagcgtgtagccgtagatgaagcggaacagcagcagcgtgacgaacagctggtggccgaacggcaggaacgacgacggcgccgtgaccgcggcctgcgcgggcgagccttccgcatacacctggttgagcagggggcgcgcgtacggcgcgatgacgagcacggcgacgagcgggatgacgcagaacagcgccaggttcacgccccagggcagcagcgcgaacacgctgcgcagcgcgtaggccagcacgtacgccagcgtgacgctgatgccgagccggcgcatgtccagcccgatgcacccgatgcccacgatgatgttcgacagccccgtccccacggtgaccagcgccgcgccgcacacgagcacggctggcagcgacccgaagatccccgccgccatcacgagcgatcccgcaaccatggtcgacaccgccgccacgaggaaccttcggctggtgaacaggcgcggatgccagtacgacgcgaacgcgagcacggtgagcgtgaggccgcccacgacggcgctggcttcgcgcgtccacaggtacacgtgatcgaacagggggaaggcgctgtagttcagcagccagtagccgatgaacgagcccatgagcgcggcggtgcacgcgaggaagcgcagcgggtgcaccggcttgggcgcggtatgagggaacgcggcagccatgcttgaatcccctcccggataggcatcgtgcggtgtttccgggggctattctagcaggagccggcacctcacgagggggcgggaggcaaaatcacccgacccgtatgagacgcttcactcgggtgacgtgacgcttttccggtggatgacccgtagagttgaatgcgttccaaccggggcgtttcggcgcttcgaccacattcacaagaaggaaggggagagtcatgacggaagcgaacaagggattgagccgtcgcgcatttctgggtttgggagccgcggccgccgcgctggcaggggccggcttggcggggtgctcgcctgccgccgcgccctcgaaggaggatgcggccgccgctgcagtgaacgattggctgggcgctgagcccgagattcccgaggacaagatcgtcgagaccgtcgacaccgagatcctcgtgtgcggcgccggcacgtccggcctgttcgccgcttgctcggccgctgaggagggcgcgaaggtcgtctgcctcgagaaggccgccatcgacggcggcgtccgcgacaacctgggctcgctcaacagccgcctgcagaaggaggccggctgcgagatcgacgagaacgagatatgcaacgacctcatgcgctacgccgacggctactgcaacccgcgcctgtaccacatctgggcgcagaattcgggcgaggccatcgattggtatcaggatcgcctggaggaagccgggttccagctgttcttcgaggcggcgaacgatgccaaaccgtccatctacaagcactgggccactggtcatattcccagctggccggccgatgccgagttcgcgggcctcaaggatgtgacgaacggcaagatcgtcctgggcgattacgccaagaaggtgggcgtggacttccgtttcaccacgccgcttgtgaagctcgtgcatgagaacggcaaggtgaccggtgccatcgccaagggctccgacggctacatcaagatcaacgccagcaagggcactgtggtgtgcacgggcggttacgcgcgcaacgaggacatgttgaaggcactgcagccgcagacgctgaacaagtactcgctgtccatcgccatcgacggcaccacgggcgacggcatcaagtcgtgcctgtgggcgggtgcgcgcatggacgaggtgcacacggccatggtgttcgaccgcgttgccgtgaagcccgacgagttcggcggcgcgcagaccacggggtcgctgttctggatgggctcgaacccgtggctcaaggtgaacctcaacggcgagcgcttcgccaacgagtccggcccgtacgactacatcctgaacgcggcgctcacgcagccgaaccacaccgtggtggacatctgggattcggattacgagacctacctcgagcagttcgacatccacggctgcgcgcgcgtgtacccgttcgagaacggcgcgcccacgaacatgacgctcgagacggtgaagggcatcaacgaggggctgctggccgacggctacatcgtgaaggccgacaccatcgaggagctggccaagggcttggggcttccggtcgagaacctcaagaagacggtcgatcgccagaacgagaactacgacaaccaggttgatcctgacttcggcaaagaggccttccgcctgtcgcccgtgcgcaaggcgccgttctacggcgtgcgcacctcgggctacatgctgtgcacgctcgacggcatcaccatcaacgagaacttccaggccgtgaacgaggagggcgaggccatcgagggcctgtacgtgaccggcgtcgactcgggctcgtactatgcgcacacgtacccgaacatgtccacgggcaactgctgcggccgttcggtgacgttcgcccgcatgatcggcaaggcgctggccgccaagtagcgccaggcggcgcgatgccgccgcaatcgactatcccggggccgttcgccgcacggcgcggcccctcattcgcccggccccgcgcaacccttccctctcttgcgcggggccgttttgcgcaatcgagctcggattccgctgtttggcggcggggtgcggtcgccaaggcgaaacgtggcaagtccgcgtcgaaatgtgcatgtcgagaggggtcgcgaagcgttcatctttgcctcgatatccgaacgaccaggtcaaacgaacgcatcgttgctttattttcatgtgaggatagccatggcgatgcgaacttgccatgtttcgtccagcggtaggagcagggcttattcagctcccactgctttgatggcgatgtcgtcttgttccagctcctggcggatgcggctgacgaaggccagcgcgctgggggaatctccgtgcacgcacagcgtgtcggggtggaggtccaccagcttgcccgtgacggacagcacggcgccttcgcggatggcgttcttgacgcgctcgatggcgtgttcttcgtcgcgtatgagcgcggcaggatcgttgcggctgaccaggcggccctcgtcggtgtagttgcggtcggcgaagaactcttcggccgtgaccagccccagcttgcggccttcgtccacaagcgcgctgttggccaggcccaccagcactagcttggggtccacgtcgcggacggcctgcgccagcgcagctgccaactcggaatcgatggcggcgtggttgtacagctggccgtgcggcttcacgtgcgcgagctgcacgccctgcgccgagcagaacgcctgcagcgcgccgatctggtacagcatgtaggagtacgcctcgtcgggcgacaggtgcatgtcgcggcgcccgaagccctgcagatcgggatagcccggatgcgcgccgatggcgatgccggcgtccttcgccatgcccaccgtcttgcgcatgaccaccggatcgcccgcatgctgcccgcacgcgatgttcgcgctggacacaagcgggatgatctggtcgtcgagccccagcgtgtagcgcccgaagctctcgcccaggtcgctgttcaagtcgatgcggtacataggcagccttctttcctgcgtggtttcaacctattgtaaagcaacgccccgcgccaggtgaagagcgcggggcgttgggtgcgagtgtttcacgtgaaacactcgttcgtggggtgaacgagcctattccttcaggttgatgttcttggtgtcggtgatgagcatgcagccgggagcgtgggtgatggcgaagggcggcttgctgttcatgacgatggactggggcgtgacaccgcaggcccagaacacgggaacttcgccgtcgcggatttccacagggtcgccgaactcgggatgcatgatgtcacgcacgccgatggcatccggatcgccgatgtggataggggcgccgtgcaccttcgggatggcaccggagatctgcaccgccttcaccacctggtcgtaggggatggggcgcatcgacatcaccatgttgccgctcatggagcccgccggggtgcacggcacgcccgtcaggtacatgggcacgttgcagcccatggtgttgtggcggatctcgatgccggcctcgatgagctcggactcgaacgagaacgagcagccgatgacgaacgatacgaggtcgtcgcgccagtagtcctcgacattctccacttcggccaccagcttgccgtgctcgtagatgcggtagcgcgggaagtcggtggcgatgtcgcagtcggttgcgcagatggcagcctcgcgtgcgcccacctcggtcacttccagcagcgggcacggcttggggttgcgctgcgcgaacagcaggaagtcgtaggcctgctccttcggcagcacgatgaggttcgcctgcgcatacccgggacacagcccgctcgtcggcgccgtgaactcccccgagcgaatgagatgccgcgcctcgaccggagaagcggaaagcatctgcgcccagacgtcgtcagccacgccctcgggcttgacgggaacttgagcatccatcataagagaacccctttcctcggtgtcgccataattatggcacgttgatgatcgctttcgagcagcgtctttatgaccgccatgttgtttccgagtcacgtgttccgtgccttggcagagatcgcacgctatgcacgattttttcgggtaaccagtccgtcatctcggagaaatcgctggtcggcttctgcgattcgcgcgcaaaatcgtgcatagcgtgcgatctctgccaaggcggggtgtggccgatgcttttccgttgccgaaccgggtggccgatcgcgggttcgaggggttgaggacggcggcgccttttgctggcgccacacgggatccttcgactctgcgcctggcggcgctccgctcaggatgacaacctgcggggctcggcctctgctcaggatagcaaccaggtagcccatcccttcctctctcagaacggcgaacctcgcgccccgcacaaaagggcttttcgagcctacgtccgacgccgccctcgccgcccgcaagcccctcgccggtccatgaagggcgacatcagacgtgcgaaggatccgttcggggcgtgcccaccaagcgagttccgcacgagccaaacagcccagtgggctgtttgtgcgagccaggactgtctgagcgactgggcatgccccgagcggatccgccagaaacccctacacttcgcccttcatgaagcgctcgatgaagctggtgtcggcgtggccggcggcgaacgtctcgttctccatgatggcgtactggaagtccaggttcgtcttcacgcccaccaccaccatctcctccagcgcggtgcgcatcttcgcgatagcctcggtgcggtcgcgtccatgcacgatcaccttggcgatcatggagtcgtaatacggcgtgatctcgtagccgtcgtacgccgccgtgtccacgcgcacgccgttgccgccgggcaggtgcatctgcgagatggtgccgggcgacggcaggaacccgcgctcgggctgctcggcgttcacgcggcattcgatggcgtggccgcggtacgtgatgtcgtcctgcgtgaacgtcagcgggtcgcccgccgccacgcggatcatctcttccacgaggtcggtgcccgtgaccatctcggtgacggggtgttccacctggatgcgcgtgttcatctccatgaagtagtagttcagcttatcgtccagcagaaactcgatggtgcccgccgacgtgtagcccacggcctgcgccgcgcgcacggcggcttccagcatctcgtcgcgcacgcgctccgtcatcacgggcgaggggctttcctcgatcatcttctggtggttgcgctgcaccgagcaatcgcgctcgcccagggccaccacggtgccgtacgtatcggcgatgatctgcacctccacgtggcgcgggctcagcacgcagcgctccaggtacatggtgttgtcgccgaacgcgcccacgctctcgcgctgagcgatggagaactgctcggagaagtcgtgctcgtcgtggctgatgcgcatgcccttgccgccaccgcccgacgacgccttgatcatgatgggccagccgatctcgcgtgccatcgccagcgcttcctccggatggtgcacgggctccttcgtgccgggaaccacgggcacgcccgcctccatcatggtcttgcgggcctggctcttgttgcccatgcggtccaggacctcgggcgcggggccgatgaacacgatgtcgttctcgcggcacagcttcgcgaacgtcgagttctccgacaggaagccgtagccgggatggatggcctgcgcgccggtgcccttcgcggcggacaggatggcggcgatgttcaggtacgagtcgcgcgcggcgggcgggccgatgcacacgctctcgtcggccaggtacacgtgcagcgaatgcttgtcggccgtggagtacacggccaccgtcttgatgtccatggcgcggcaggcgcggatgatgcggacggcgatctcgccgcggttggcgatgagtatcttgtcgaacatggcgcgcgccgccctagtgcgtttcgccggcggcggtggccacgcggaacagcggctggtcgtattcgacctgcgtgccgttggctgccagcacctccacgacgatgccgggggcgggcgtggtgatctcgttcatcatcttcatggcctcgacgatggccagcgtctggccggacagcacttcctggcccaccttcacgaagggatcttcgtcggggctgggcgagatgtagaacatgcccaccatggggctgcgcacgaggatggagctttcgtcggcgtcctcgacggcggccgcttcgtggctttcggtcttgccggccagcagcgcgctcacgcgatcggccatgagcggcagcgcggtagacgagagcgggccgtggttgcgctccaattcgattttcgtttcgccgtcatccacgcgcaaggccgtgagctcggccttgtccatgatggcgatcagttcttcgatggctttcgtatccatggcggttctcctacgtttgtgacggggttctgtgacggccggcttcggcgaacccctacctacttcttcttcgtctacgtcgttgcgcgttcggtggtgtcggttgcgtcgggcggttgtttctttggcgggacggttcccagggcgttgcggttgccgacgcgctgggagcgatcggctcggtcgatccacaacatgtcggcctgcgacttgcgtgcctgttcctccaggatgggggtcaggcgccgcgccgtgcgccggggcgatatgccgtcggcgctgggccgcctcactttcaacgccagcatttcgaacaggtgcgcctcttcgcgcagcagcgcttgggactcctgcacgccgatggactcgaagcggatcttgccgcccggcggacgttgcaccagcttcgggatgtccacgctggcgatggtgccgattttcgcgtaaccgccggtagtttgccggtcggccagcatgatgatgggccgtccgtgcgacggtacctgcacggcgccgaacgccacgccgtcggagatgatgtcggacccgtgcttcgtctcgatttccggtccgtccaggcggtaccccatgcggtcgcatttcgtggtggtggtgtacgcctgcccgtagaacgtagccaggcctttgtcggtgaacatgtcctgctgaggcccgggcaccacgcgcacggtgatttcgtcgcggtcgaagccgtagaactcgttgtcgccgtcgatgcggtgcgaccctaggttgggcaggaagtccacgctcttcgtggaaaacggcaggtagtcgccgacgatgagcgtgcgacccttccatccgccgaactcgcacttgaggttcgtcgagcgactgcccatcacttcgggcacgcgcacgctgttgcccgcgatggccaagtaaccgtagcagccggtgcgcgacgccttgaagcgcaggatggagccgcgccgcaccatgacggccgcgtacatgggcacgggttcgccgtccagcgtcggcgcgaagtcgccgcccgtgatggcgaagcaggtgttcgtggtgaagcgcaccgtgggtcccgccagcgcgaattccagcacgggtgcgccggggtcgttctccaccaggaggttcgcgatggcgaacgcgcgatgatccatcacgccgttcgtggagaagccgctgccctgatagccgaagcgccccacgtcctggatggtggtgatcacaccgggttttttgacgaccagacccatgctactcgccttccacgaagatgccgtacgaatacgtgcccgcggccagctgcgcttcgatggcggtgtactcgtcgggcgtgatgggcacgaagcgcaggtactcgcccgctgcgtacaggatgggttcctcacgatcgggatcgtagggtttgagcggcgtgcgcccgatgatctgccagccgccgggggaggccagcgggtagatgcccgtctgcgcgccgcctattccgacgctgcccggctcgatgcgcgtgcgcggcacggccaggcgcggcgtgtgcaggcgctcgtcgaggccgcccaggtaggcgaagccgggaaggaagcccagcatgtcgatgaggtagtcgcgctcggtgtggatggcgatcacttcgtcttcggaaaggcctgccagttgcgccacgttcgctaggtcggggccgaactcgcccccgtagcacacggggatgggcacgattttgcggatgctgaggtcggcctcgcccacgtcgcgcagcttggagcgcagcttcgtggacagctcgtcgaacgtgatgaccagggggttgtaatacaccataagcgagcagaacgtgggcaccagctcggtgatgccccgaatgggatctgcggtaaggttgtctgcggccatgcggatcttggcgctcgtctccgcggatatcgcatgggcgaattccaagttgagcgccgagtctcctgcgatggtgatggtgaatcccgccatgcaattccgtcctctggcgtgtgcgtcgtcttatgatgtgcgccccgtgctacacttgtaggctggtcacatagataaggattgtagcatatatggaaaaagcgcttttcctggccgcgttctttttcgcatacacggtccaggccatcacgggattcgcagggaacatcttcgccatgccggtgggcacgacgctgctgggcctggaatctacggtgtccatcctcaacgcgatgggctttttcgcctgcggcttgctgacggcactcaacatcaagagcgtgaattggcgcgagcttggcaagatcctgggcgcgatgatcgtgttcatggtgctgggcatttggctggataccctggtgcccctgcatatcctgttgaagatctacggcgtgatcatcgtgatcatcggtatcaagaacctggcggtgccccagcagaagttcatgccggaatgggcgctgtggatcattctcgctctggccggcctgatccaaggcatgttcgtgtcgggcggcgcgctgctggtcatctacgcggtgcagaagctgcgcgatcagcagcagttccgcatcacgctgtccgccgtgtggaccgtgctcaaccttatttacgcaggcatcgcgtttcagcaggggcacttcacgggcgacgtcgtccagatcatcgtgttctgcgtgccgttggccgtgctggccacgtttctgggcagcaagctgcagaagaagatcagccaggaaaggttcctcaaactcacgtacgtgctgttgttgtgcgtcggcgtcatcttgctggttacgtcgtagcgttcggcggcgcgcggaggtgctgcttggggtacaatgaccccagatgcaatcgagggaaaggaacgaccatggcgcaggaatacgctcgtatcttcgccgcgctcgacggcgcgtcgacgcaggaagcggtcgcgcagcgcgcggtgacgcttgcggcggacaaccacgcgaagctcatgttcggccacgtgatcgattcggttccctacgaggcttcgggcgtcgatttcgaagcgttgtgcgccgagggcaaaaagcgcatcgaagccgacctggccgacgtgctggctgcggcgcgccagaacccggacattccgtccgtggaagtgtctgtgcacgcggggcgcatcgccgacacgctggagcacgagctgatcgagccgttcgagccgaacctcgtggtgtgcggcgagcgcgggctgtcgaacatcaagtacgtgttcgtgggcagcgtgtccacgttcctcatccgcaacctccgctgcgacgtgctggtggtgaagcagtagggaacgaggcagaatgagacaggtgaacggggccgatggctcgctccgttttctgcgagaagaagcgaatcgcccgatcggttgaagccggtcgggcgattctcgttttagcccgccgaaaggggggtagggcttgacgacggcatcgtgcgctgtcggctacccctcgcggcacaggtcgatgatgtcctgcttggagtggacgtcgagcttccggtacacgcgcttcgtatacgtcttcacggtgttctccgagacgtcgagagcgcgcgcgatggcggccaccgtttccccgagggccagcagctcgagcgtttgacgctcgcggtcggtcaggccgtgttggagggctaagcgctcgcacgggttcgcgcgggtgaccgcgaggggcgctgatgccggctggtcgtctccgacggcgcattgtcgcccgaaagcctcggtttcgggtgtaaaagcgcggctttcgggcgacaacgcgtccgtggagcgcgcgggcgcgacgtcggccaagcgaggctggcgcatgaaggccgccagttccgcacgggtatgcacgtcgaaggctcggtagatcttctgcgtatggtatttcacggcgctcggcgagaggtagagatcctgcgcgatgcgcgcgatggtgcgaccctctagaagctgtttgaagacggtagtctccagatcgctcagcccgtaggcggcggcgacgagatcgggttcgggcgcggcgacgatctggatcggcgcggaggcaagccgggttgcgtcggcgggttccgaggcggcgccgccggatggtcgcgcgtcttgctcgggcggcggtgaaggctgcggatcgctgcggcgcgggatgcgctcgcggccaaggagccaggaagcacccagcatgaccaggtacaacgttcccaacccgatgagggcgaacccggcgttcgtccccggaaggtacacgcgggtcagcgcacccgcttccgttcccgccagcaggcacagcagcgaaaccgtatcgcttgcggcgaatagcggcatgacgggtatgcgcgcagcctttcccacttcggcgatggtgcaggccagcacgatgccgcacatcatgtagcccgtggtggccagcgtgccggcaatagcgggagggacggcttccgtcagccctggcagcaccagcaggcccagcgcggaaagcggcagggccacgcggtagctgctttccagcttgaacggctggcgaaacagcagcgcgggcaccgacatgataaccagcacgcaggcggaaatccccagcacgaggtactgcatgagatcgggatcgatgtcgggttgccccgataggctggtgacgaacccgctgagcagggcgaacaatcctacggcaagcacgcctttgcccacgagcggcgcgacgtcggctatctggctggagaaggtgcgctcgatgggccgtgcgacgcgcagccgggtggcgcaggcgcatgccgccagcagcgatgccagggtgatggggatgtaccattcctgcgggcattgcagcacgatcgcgcacagcgcggtggcggccgcatggctgcccagcaggaacaggtagctggtgcggtaggaaaacatcggcagcgccgacagccacagcaagctgagcaccgcctggccgacgccgatgagcaccgtgcccgccacgaacccgggctgcatgcctacgctgcatgatcccagcaccagcgcgaatcctatgcacagcgctacggcggcgaaaccggccgcctttgagccaaggggctcgtgcgcgacgttgcggtaccgcagggcgacggctacgaacgctgctgcgtgcgtcgcgccgagcaccggcatgtacgtgccgtcgtcgaatgagggcacgctggcgaacgcggtggtcgcatggtagctgaggatattggcaagcaggagaaacgcatatcctgcgtagcatgctgcgcgcgtagccatgttcgatctcccctccatgccccgagcgatccgcttcccgtgcggatgccgcgccctgccctacatgatacccgtcgcgaagcgccgcgctgctcattttggccgtttcgggtgacagaaaaccgggtcttagcggctctgggtgatgcctgtttgcctgctgcttcgtatgctgggggcgtggttggcggcctttcggcggtcgtccatttcgtcaaaggaagagggaaggggatcattatgagagagcagaaactcacccgtcgcacgtttctcggcttgggcgcgacagctgcggtggccggggcggccggcctcgcgggatgcgcgccggctgcgaaaagcgatgcgggcgcagacgcaggcgcggccgagggcggcgcggcaggttcgggcggcgcagcggcgggcggcaaccccacggagttcgtgccgtcgttcatgaacccgccggcgcccgtcgacgagtcgaaggtaaccgaaaccgtcgacgtcgatgtgtgcgtggtgggcctcggcctggcgggcgtgtgcgcgctgcgcgaagccgcggagtccggcgcgaagacgttcggcttcgataaaggttccgacgtgggctaccgctcgggcgagttcggcacgttcggcagcgagatccacaagcagttgggcatcgagcagcctgagacgcaggaagtggtcaacgagctgatgaaggtcatgggcaaccgccccaatgcgcagctgctgaactactggatcgcgaactccggcccggacttggactggtacatcggcactgccgagcacgagctgctgaccagcgatcacgccgcgcccaccgatcccgagaagccctacgtgcttcccgagcgcttcccggtgaacgagaactacaactggcgcgaggagaactacccgtgcttccccggcatggtgcacctgctgcccgaccacggctgggccatgcacggcacgctggaggccgcgcagaaggccggcgccgaggcgcgtttcaacctgaagggcgagcagctcatcaaggaaggcgacaaggtggtgggcgtgtatgcgtccgacgaagacggcaacatcgtgcgcgtcaacgcgaagaagggcgttgtgctgtcgtgcggcgacatgtccagcgacaccgagatgctgacgtactacgcgccccaggccacgaagtacggctgctttttcagcaccatggacaagagcggaaagccggtgaacacgggcgacggccacaagatggccatgtgggccggcgcggtcatggaggacggcccctatgccccgatgacgcacagcctgggaacgaactccgtcggcatcgacccgttcctcatggtgaaccaggacggcaagcgcttcgccaacgaggacgtgggagcgcaggagctgcagaacgccatcaagcgtcagaagggcggcgtgtcgtaccagatcttcgacagcaagtggaaagagcagctgtcggcgatgccccagtgcttcggcggcgtgacgcactacatcccgcccgagcaggaagccgagtacgagcacgccatcaaccacttcgctgcgggctacgcctccgacacgtacttccagggcgagatcgagcaaggctccatcatcccggccgattccatcgatgagttggcgaaggccgtgaacatcccggctgacgcgctggtggagacggtggagcgctacaacgagctggcgcacgcgggcaaggacgcggacttctccaaggtgtccacgcgcctgttccccgtggagaacccgccgtactacgcggtgccgttcggcgactcgggcatgttggtgctgatcggcggcatcgattgcgacgtcgactgccgcgcgctcgatgccgagaagaacccggtgcccggcctgttcgtggcggggaacaccatgggcggccgcttcctggtggactatcccgtgacggtggccggcgccagccactcgatggccatgtcgttcggtcgcctggccggtcgcaaggcggcagaaggcaagtagcgcgaagccctgcggcgcgcaccgcgcgcgccgcagggtgccgggcggcgttgccgcccggcaccctcgcgcggctgcgccgcgcgaggcctcctgtaccgtaccgcccaaggccgctcgcctccctccccgagcggccttggtcttgcgcggcgctattgcggcagcgctgcgtgaagctttgcaatcgtccaaaatctaccgaggatctaccagaatctgccaaaatctaccaatcggcacataatgaggcagggggcggggttgatggctgtttttgaaagcaggatgaggcagcagccattttttctcgccgatcttctgttccgttcttgttgcggttgcttgcggcggtctcgcctgccttcgcagcgcgttcctgaaattcaataagcaaaaccatcatggacaaaaagtgcttccattcagtagtttttgatcccgaattccgcaagcccggaacggcgtttttcataatgccaggtgaaaggcttgtccttcaatctatcctcaggaaagattactgaaccgaggcgatttttgtccatgacgctatcggtaatggaaaactgtcgccaagcggaaggagcatgaggcaggggacgggcggtcggtcggcgacccgttggggacagggggggcggccggtgactcgttggagccagggggcgggcgggcgacggtgactcgtcggaggcgggggggcggccggtcggcgatccgtcgggtctcggccgtaccgaaccaaaagccggcggggcgtccgatccggcggagccgttgcgctccggccgcgttcgatccggcgaaaccgtcaagctccggctgcgtccgattcgggccggttcctaccgtaatgggctgtcagccccgttccccctgccgcgctcccgtttcctgcgagaagagggaaccgcccgatcggttggagccggtcgggcggttctcgttttccagctcgccaagggggaggggaggtcggcgagtgtggacggggttgttcggtttacagctgcgccaggatgcggccgaccagcatgccgtgcgtcagcgccatgccgtggctgatgccaggggcgggcagcgggtagtcgacgaggaagcggccgccttgggcgttgcccacggcgtacaggccctcgatgacctcgtcctcggtgtccatcacgttgaagtccacgtcggtttgcaggccgcccatgttcacgaggatcaccgtgtcggtgagcgggtaggcgtagaacggaccttcctctacggggaacagacggtcggcgcgcttgccgaagtcctcgtcgttgccggcggccgccagctcgttatagcgctcgatggtggcggtgagcgcggcttcgtcaacctccatgagcttggccagctcggcgatggagttcgccgtcacgcccaaggccttctcgccctcgaagtagctcaggaagcccggcgtgttgccgtcttcgttatcctcgtcggagatgtaggcgtttttgccgtacgagccgttgggcacgtcggcgcccgactccacgtaccagttcacgttgccgtggccggtgtccatgtacttgatctggtctttccacttgctgtcgaagatctgccaggccgtcttcttcggcaggcgcgaaagctggttctggaacggctggcctcccacgtcctcgttcatgaagcgctcgccgttgatgtccaccagcaggaacgcatccatgcccagaggcccgcccaagtggtgcgtcatgggagcgtgcgggccatcctccatcttcgcgccgatccacatgcccatctgctggccgtcgcccgtgttcgtcttctcgcccttggcgtcgacgttcgggaaaatgctcatgaagcggtcggaccacggcacgtagtagctcatcatctcggcgttcgaggcgtagtcgcccgtagccagaagcacggccttgctagcggtgatcttcttgtaatcgccgttctcgtcttcgacgatgacgccttccacgcgccctgcgttgtccgggcgcaccagctggcgggcgaacgtggagtacaggaactgcacgccggccttttcgcaaatgtccaccatgttctggatgtaggggccgttgtcgggcaggcagatctggcagtcgtcgaagatggggtagaaatcgtcggcgatgttggcctcggcgggatgcggccagtgcattttgcggacgctcatggacttgccgtcgtaggtgtcggattccgcctccaccacgtactgaccctcgctggcggccaggaaccaatcgaacgcctcgccggagttgtcggcccacaggttcaggatgcgctggttggggcggtagccgcactctttcatgatctggccgactgcggcgttcttgtcgatgtggatgcccaggtcctcttggattttgccgccgatgcagcccacctggttcgagcggtactgccacgtggtggccttctccacgacgacgatgttcttcgcgccgctttccacggctgcgcgagccgcgctgatgccggagagtccggcgcccacgatgacgatgtcggcttcgacggtctctttgatgtcgctttcggcaatgggactcggcccggtcaggaagctcggtccgccggcggcgccggcgtccgatgcgcctgcgcttgccgcgtcgctgctggcttgcggcgagcagccggccagccctgcggctccggcggccatggcggctgtggcgcccaagcctagaaacgcgcggcgggacagccctcgttcattgcgtgacatggtcatgtcgtcctccctgttcgaagtgttctcgcgtcatccctcatgtgacgctggcatgacgatacgtcgcagcgcgtggtttgccgccgacccaaagggttgattccgaaggaggtgggttgatatcgtcccaaagggttgatgctggcgtgcgttcgcgctccgggtgaaaaagtccggtacaatgacggaagttttcatggacgtgcgaggggcaagtggtcgcctggagggaggagggtcggtgaaggctacgttctcgtcgacggatcgcgggttcactttgcgctacgtcggtctgagtttctactacgcctgggtgttcttgtcgttcaattctcttgatatcgtgggaggagacggacgggctatctcgatggtgcacatcgtgtcgtcggccaccgccatggtgatgtttgcggcgtgcgcgttaaattggcgctcggtgatggggtgggcggccgggcgcgttcggtctgtgctgctggcgtgcggcgtgacggcgcttgtcggaacctgcctgtacgcgcttcccgcgttttctgctttgcctgcggtcatgggcgtgggtgcgtttgccacgggattcgcctgcacgcccatcgtcttggcatggggcgtgatataccgcgatctcgatgcccggcgcgctgtgctgttcacatccatgacgtttctgggtgcggccttgctgcacggggcgatcatgctgcttggtccgacgctggcaccggtggcggtgtcgctgttgcccttggctgcggcggttgccgcaacggccagcctgcgtgattggaaggccgagcgcgtgccggatgccgaaacgcgccgtcgcgcgcggggcgagatacgcgatctggttcgtacggcgttgtcgtggcgcgtgctggcggggctgatcgcggcgttgttcgcgtatggcgggttgcgggtatatttcggctcggttgcgccgagcgtgttctcgaatcctgcgcttatggcgggcaccattgcgctggcagcgttcgtgttcttcgtgtacggcgctttggtgtcgcgcacgagcctcaaccttggcgtgctgtaccgtattgccatgtcggtatgggcgttggcgttcgtgttgatcgcgctggtggggcacgacaacatgacgatggtgttcttcatggcatcgctcagctcggtgttgttcgaagtgctcacctgggcgctgctggtcgagatcgcgcgcacgacccattttgctgcgctgctggtgttcgcggtgggccgtttggccgtgcatgtgggaatagtagtcggcgaggtggctgcgttcgcgttgatcgacgatatgctgctgtttgcggttgtggccgtgttcgtgttggtggcgtcgacgggtttcgcgttcgccgaccgcgataccacgttcgcatttgagagcccgacgccggccgagttggagcgactttccggtggggacgggcgttcgcatgccgacgagtcggtttcgtctggctcgggggctgcgggctctgcggttgagccggcggatgcgagccttgttcctgtcgccacggacgttggggcgcgcatcgaagcgctggcgaaagcgtatcagctatcgccgcgcgagaaggaggtgttcgctctgtgggtgacggggcacggctcgaagtacatccaggagaagttcgtcatctcgccggcaacggtgaaaacccatgtgcgccatatttacgagaagtgcgatgtccacaaccgcgccgaacttatgcgcaagctggaagaggccggttaaaagagcgacgtgcgtttaatcgaggttcatcaaccattttctcgccgatcttctgtcccgttcttgttgcggttgcttgcggcgatcccgcctgccttcgcagcgcgctcctgaaattcaataagcaaaaccatcgtggacaaaaagtgcctccattcagtagtttttgaccccaaattccgcaagcccggaacggcgttttttataatgccaggtgagaggcttgcccttcgatctatcctcggaaaagattactgaatcgaggcggtttttgtccatgatcctatcggtaatggaaaactgttgccaagcgggcggagaatgagacaggggacgggcggtcgacggcgacccgttggagccagggggtggtcggcgatccgtcgggtcccggccgtaccgaaccaaaagccggctgggcgtccgacccggtggagccgtcaagctccggctgcgttcgattcgggccggttcctcccgtaatgagccgtcagccccgttccccctgcctcatccaaaaacgacgaagccctccgggtgtcggagggcttcgtgacggtcgcagggggcgcgctcttaggcgcgcgttgccagcttgcggttcaccacgcgcttgaacatcacggtgagcagcacgaggcccacgccgatgaggatgtggccgatgccggcgatgcccgagatggcggcatcgggcatcgcaagcggtgctccggtgacttccacgacgccgcgcaccagcatcatgcacacggtgacgaccaggccaacgttgtacacgatgtagaacggcttgaacagcttgtcgccggtgaagtcgtcctgcaaagcgaacagcgtggcgatcaggaataccgcgaacccgagcaccagcaggtgcgggtgcataagtcccagcgtggtctgcccggtgaactgcgcgaagttcgtgaactcgcggaagaacacgcctgccgccgcgccggcgataaggtatacgagcgcggtgttgatcagtttcttcataaggatcctccctggtccgtatggtcaaatatgaacgttgttcattatccgaggtttctttttccgaaggggatatgtcaccaaatcgtcatcaattgccgtttccctgcgggcgatccacgagcgcgagcggttgtgctaccctgttcctcatcgaaatcaacggcggagccgggcgacaagacgaggacgtggtgcatatggtgaacgagagaatgtacggcttgggagccgagccgagcgcgattcgcgagttgttcgcgtacggcatggtgcgcaaggcggaaatcggcgccgagaacgtgttcgacttcagcatcggcaaccctagcgttcccgcgcccgatgccgtgaagcaggcggtgctcgagctcatggacgaggagcccagcgctttgcacggctacacgccggcagcgggcgatccgcgcgtgcgccaggccgtggccgaccatattcgccgtcgctacgacgtgcccgcccagcccgagcaggtgtacctcacggcaggtgccgccgcaggcttggccatctccatctcggccgtcaccgagcctggcgacgaggtcatcatcatcgccccgttctttcccgagtacaaggtgtggatcggcacggcgggatgcgcgtgcgtggaggtgccggcgcatgtgcccgacttccagctggatatcgacgcgcttgcgcaggccatcgggccgaagacggccgccatcatcctcaactcgccgaacaacccggtgggcgccgtgtactcgcgcgagaacctggaggcgttcgccgcgctgcttgcccgcaaggaagaagagctcggccgcaagctgtacgttatcagcgacgagccgtaccgcgagatcacgtacggcgccgaggttccctacgtgccgtgcgtgtggccgcgcaccatcgtgtgctactcgtactcgaagtcgctgtcgctgccgggcgagcgcatcgggtatctgtacgtgtccgacctgatggacgacgcgcgcgaagtgtccacggcggtggccggcgcgggccgcgcgctgggcttcatctgcgcgccggtgctgttccagcgcgttatcgcgcgctgcatcgatgagccttccgacgtggcggcctacgcggccaaccgcgagctgctgacgacgggcctcggcgagttgggatacgagttcgtggaaccgcagggcgcgttctacctgtgggtgcgcgcgctcgaggacgacgcgcaggcgttcagcgatcgcgcgaaggctcatgagctgctactggttccatccgacagcttcggcgtcggcggctgggtgcgcgtgagctactgcgtctcgcgcgaggtcatcgagcgcagcatgcccgcgttcaaggctctcaaagaatcgtacgaaggctaagggcttgccgtgaagggccggcgacgcggcttcggccgtcgttgccggctttttgttttgccgaaccggaaaggtcgggaaaaaagtgttgccctcctcgaactaatgatggcgctctcgtcctcgacgcgcgataatatcgctagatcgctttgctgcgataaagcagcatagcgatgcagacggtataggttcgaacaaggggacacacgatggctcagcaagacggttctccggcgaaggcgtccggagagaacatcgagcagttcggctacaagcaggaactgcgaagaggtatgggactatgggacgtggtattgtacggcgtcctgttcatggtgattatcgcgccgcagtccattttcggcaccattcagcagaacagccacggcatgacgccgctggtgtacatcatcggcttcgtggccattctgttcacggctatgagctacatgcgcatgagcaagcggtttcccatcgcgggttcggtttactcctacgtgcagcgcggcatcaacccgcacgtgggcttcatggcgggctggctgatcctgctcgactacgtgctggttccctccttgctcatcgtcatggtgatgaactggggcgtggcgctggtgccgggcagcccggcatggctgtgggctgtggcgttcatcgcgttcaacacgttcgtcaacattcgcggcattcagatgagccgcggcgttgactgggtcatcttcatcgtcgagattgtggccgtggtcgcgttcatcgctcttggcaccaacttcgtgttgggcggcggcggcgcgggcggcttcgtcctcgacccgatctaccaaccgggtcaggtggacgcgcacttcgtggcggcgggcatctccatcgcggcgctttcgttcctgggcttcgacggcatgtccacgctggccgaggaaacgcacgagcccgagaagaacatcggcaagggcatcatcatcgcactgtccatcatcatcgtcgtgttcgtggcgcagacctacatcgccgccatcgtgcagcccgattgggcggccaccgatcccgacatgggcttcttcgattccgtctacctggtgggcgggccggtgttctacaagatcatgttgctggtcaacatcgtcgcggtgggcatcgccaacatcatcaacgcgcagatggcatcctcgcgcctgctgtacagcatgggccgcgacggcgtgatcccgcgcgtgttcggcaaggtgcatccgaagttccagacgccgtggttcgcctccatcttcttgggcgcgatcacgctgtgcctggcgcttccgctgcaggactacatgggcacgctggcgggcttcgtgaacttcggcgccctgtcgtcgttcatcctgctgaacttcgccgtgttctggttcttcttcgtgaaggagaagaagcgcgcgtcgttcaaggacatcctgatgtacctcatctgcccgttcatcggcatagccattttgggttacgtgttcaccggcttcgagtgggccacgtatgccgtgggcgtcacctggctggtcatcggcctgatcgtcggcgcggtgaaatccaagggctacaaggaagtgcccgaggcgttcaagaacctggaagtgtaaggacgcattcgttgattgaagggacggccgcggtgcatttgccgcggccgttcgcgttttcgttccccgcaacgcatcatcgcccgaaaaacacgcctcagcttcgatttccgtgtttttcgggcgatgatggtgcgcaagccgaatgagaaggagatgacgatgggcgaaggaaaggccgtgctggccgtcggagccatcatggtggacatgctgtgccaggttgcgcgcctgccccgatcgggcgaggggatcgtggtggaggagtcgcgcgccgtcgtgggcggttgcgcgttcaacgcggcgaacgtgctgcggcagctgggtgctccgtacgagctgttcgctccggtggggtgcggcatcttcgccgggttcgtggaacgcgagctgcgcgagcgcgggctcgaggcgccacggttcgatgatcgcgacagcggcggctgcatgtgcttcgtggagccgggcggcgagcgcacgatggtcacgctgccgggcatcgagcgccatttcgtgcgcgcatggttcgaccgtgtcgaggccgcgggcttcggttgcgggttcgcgagcggctacgaggtggaagggccgggcggcgacgccatcatctcgttcttcgaggatcatccctctatagagctgtattatgcgcccggtccgcgcgtctgcggcgtaggcgcgcagaagacggcgcgcatcaacgcgttgcatccggtatggcacctgaacgaccaagaggcgcttgcgtataccgggagcgccacggttgaagaggcgggcgccgccatcgccggggagtgcggcaacgcagtggtgatcacggcgggcaaggacggcgcgcatctgttcgccggcggaaaacatgcggtggttcccgccgagcccgtggacgtggtggacaccgtcggcgcgggcgatgcgcatctgggcgcgctgaccgcagcgcgcgcggctggacgctcatgggaagacgcgctggcgttggcgaaccgcgtggccggagcggtgtgcggcgtggaagggtcgacgctggccgacgaggcgttcgcgaggacgggtgcgcggctgtagggcgcgttgtctgatggcgtagtcgttcgttgagatattctcggacgaaactgttatccatacgtaaacttgtcgtacaattgaagttacttttgaagttgcttttccctaacggctaggaattgtcgtcggtgcttgcccgtgcgatcttcccggatgaaagtggtatgctcatggaggcgatgttcggtgaagtcgaaactcttgcctacgtgatagacagcgaatgccgtgtcgtctacttcaacaagaagatggaggttgcgtttcctcatcttgaaacgggcatgctttgctatcaggccttgcgcggcgagcccgcctcttgtccggattgcccgctgatgcttgaccacgccagcaagggtcgggtctacaaccagcgcatccggagttggatagagacagaggtgagcgacatagactggcctggctcgggcgcgtgccacattttcctgagccgtgtcatcgatcggcctgatttgggcgcggccgatccgaagccgttcgatgccctgacgggcctgtatacgcgcgaagcgtttttctcggcggtctccactgcgatccaagcatatccggagcgctcgtattgcctgatggccgttgacatcgaacatttcaagctgttcaacgaatggtacggcgaagaggccggagatttgtttctggaagaggtggggaggctgctcggcgaggctgcagtcgagagcggcggcgtttcaggctacctgagcggcgacgacttctgcatgctgctgccttgcgacgagggcatgatcgagactctacgtgcccgcattacccaaagcgcgcttcatcacggcaaaggcatgggctttcttcccgcgttcgggctgttccgcattgacgaccggtccctgcccgtcggcatcatgtacgatcgcgcgttgctggctttggcctcggtcaaggggaattacgctcagcgtttccgatggtacgacgatggtatgctcagagagatcaaggacgaccattcgcttttgctcgaagtgcagcaggctttggagaagggcgagatcacgttctacgctcagccgaaatgcaacctcgacacgggcaagatcgtgggcctcgaggctctggttcgctggatgcaccctgagcgcgggctcatcccgccgatccagtttatccccatgctggagcgaaatggactgataaccgcgctcgatctgcatatttgggaggaagtgttccgcgctctccgcgcgtggatggacgccggccaggcgcccgtgcccatttccgtgaacgtgtcgcgccgcgacctgtatgcgctcgatgttttgggcacgttcgagggattgatcgaaaagtatgatatcccccctcgtctgctcgccgtcgaaatcaccgaaagcgcgtacgtcgaggattgcgagctgatcgtggacatcgtcgagggtttccacgacctgggcatctccgttcatatggacgattttggcagcgggtattcgtcgcttggcatgctgaaggacgtgaacgtcgacgtcttgaaactggacatgaagctgctggacgcgatagacgcgcaaagccgcaaagcccgtagcattctggaagccatcatcggtatggcgaacttgctggacatccgcgtgatcgcggagggggtggaaaccgaatcccaacggcaattgctggtgaagatggggtgcctgtacgggcaaggatacttcttctacaagcccatgccgaaggcggagttcgagcctttgattgcgaatcggacgaaggttgatttccgcggcatccatgcggactccatcgagaggttccgtattcgcgacctgatagagagcagggtgctcagcgatgccatgctcgacgatatcctgggtcccttggtgctgtacgatctgtacgacggcgaagtggagcttctgagcgccaacgagcattactgtcagctgaacggggttaacgccgttgacctgcacgagctgcgttccacgttcgcgcgtcgagcgttcgagtcggattgggacgaggtcatggaagcgttcgagcaagctcgcgagaacgtcccgaatggcgcggccgtcgtagtgcgtcgtatgcgcccggacgggtcgaccgctcacctgctcgtccatctgctgttcctgcgcgagcacgaaggccactacctgtatctgggttcgctgagggacgtgactcgcgagcggcagcaggcgcgtcagctggagtcctctcgtcgagcgttatcggctgccacggacgcttccccgcgcgatccgctgctcgtagcgttgggggaagagaaccggcgaaccgccctggcgctttccgccgagctttcgcccggaggcatgatcggaggatactgcgagccagagttcccgctgtacttcgccaacgctgctatggtggagcttctgggttacgacacgtacgaggaactggctgcgggcatcgattggcgcgtgggcaacaccatacatccggacgatctggcctcggttgcgctcgacatcgggcccgagtattacgtggggctcgagtacactaccacgtaccgcatggctcgcaaggacgggacgtggttctggacgctcgacaaaggccgggtggtcgaagcggaagacggcaggcttgccatcgtgagcgcttgcaccgacatcaccgaagtcatggcggtgcaacagcagcttgccgagcgaaacaaattgttgatcagccaaaacgaagagcttgcattcctgaatgaagatatgcccggtggctatcatcgctgcctcgacgctcccgggtgcgatttcctgtacatgagcgaccgctttctggacatgttcggctacacgcgcgaagagataaaggagctgttcgacgacaagtacatgctcatggtgcacccggacgaccgcgacagcgtggccaaaggcgtgaccgcgctcagggagggcactgcggggtccgatccgttggagtaccgcatgagagccaaggacggctggcgctgggtgatcgaccagagccgtttcttggaatacgatgacacctcgtttctgcagggcgtcgtagtggacgtgacggaaaccgtggagctgcgcgacatgatgagcatgctgatcgagcacacctcgagcgacatcgtgctgctgtcatggtccgacaaagaggatgtccgcgtgaacgtggtggcgtgcggtgcgtcgaagaagtacgggctctcgcccgagcagtacgaggatatcattcgcggccagctgtaccttccgagcggagacgggggcgggcgcctggtcgacgagatcgtcgacaagatcgatcgaggcgagagcttggcgattgtggatcgaccgcgctttcccgggcacgagaacgtctggatgcacgtcgaggcacgccgcgtgggcctcgagtcctctgaacgtatagcgttgtgcctggtcaccgatgtgactaccatgaagaaccagcaacaggagctgtggctcaccaagcgaaagctggagggggttctggatcaagccggcgtccaaagctgggattgggacatcagcagcaatcgtttggtactctcgcgcagcgagcttatggatcgtatattcgcaggtctgagtcgcttcgaggacgacatgctggtcgtggacgggttcgaccccgagactatgcggttccgcttcgtgccgcccgactaccagcaggcgttcagggactcgtttcggggcgtgcgcactgctcgcgatcgacagcgctcggtgttcgagattccgttcacgttcgaggacggggcgcctgtgtggatagaggtcgcgtgcgagacggtgcgcgatgagcgggatcgacccgtccgtgcggtgggatactaccttgacatgactgatcgcaggaacgaatccttgcagaacaaagcgaactccgaggcgttgcggcagctgcgagaacagagcttccagctgctcaagatggcgaagaccgatgcgttgaccgggttgcataaccgccaggcggccatcccgaagatagaggagcgcctacgcgcggtcgaggcgggcgagctgggcgatgcttcgtgtgcgctgatcatgttggatctggactccttcaagctggccaacgacgtgttcgggcacgcgtacggcgatcaggttatcgtgcatgtggccgaggctctgaaggagtcgttccctggcgacgtcgtctgccgtatgggtggggacgagttcctggtgtggtgcgaggacgtggacgagggagcgttggaggataggatcgcctctgcgctgcgtgccatggaggtcgaacgcgttgaggacggtcgaacgttcctgttctcggcgtcggccggttacgtgctggttccgcaggagggcttctcgttcgacgacttatatcagaaagcggattcggcgctgttttcggtcaagatggacggcaagcgctcctgctcgcgattctggtctgggatgaagaccgttcgctgcgagttggccgagtgacgggtgctgccggctctctgtctgcggccgcttcggctcgcttgcttgcgcgatcatgaaaacaacacttacgagaatgcttgagattcgctagaatcgaagatgccgcggcgcgcttcagcgcgcccggcgtgtctcgtttccccgaaaggcgccttctgcgctggtaggttcgatggggccaatcaagacaaccgaagacgaaaggacgattcctttatgcaagggaaacctcttgtgctgctgctgtccgtcttgtacggcagcgcgttcattgcggggttcaacgagaacctcgtcaacatggcgctcgtgtccatcatggcggagtacggcgtcgactccgtgacggctcagtggctggtcaccggctatatgatcgtggccaccgtcgtggtcacgtgcatggcgtttctctatcggcgcttccatgtgcgcacgctgttcttcggcgcggccggcttgagcatcgtcggctccgctatggggctcgtcgctcccagcttcgagctgctgctggtcgcgcgcctcgtgcaggcggtgggcacgggcatcttcatcccgcttatgatgaacaccatcctcgtggtcacgccgaagaacaagctgggcacgtacctgtccgtcggcggctgcatgatcacgttcggtcccgcgttcgccccggtggtgtgcggcgcgctggtgacggcgttcggatggcacagcattttcgtcgtgcccatcgtggcgatggcggtgctgaccgtgctcggcttcttctacatgaagaacctcgaaacgcatgaagcgcatctcgacgtgctgtcggtgctcctttccgccgtggcgctgaccgtgttgtcgttcggtttgacgcagctgaccaccgacggtgttctggctgctgccgcccttgtgctggcggcggccatggttgcagtgttcgtggtgcgccagctgcgatgcgcgcatccgcttatcgatttggcgccgatgaagaatcgcgcgttctggccggcgctcattctggtgaccatcgcgatgatgagcatgttctcgatgagcgtgctgctgccgctgtacttcgaaggcgcggcgggcatgaccgccttcgccgctggtctggtgatcctcgttcccgtgctggcgaacgcaggcgccacgctgctgggcggccgcatcatggacaaacgaggcgaatggcctttgctgcctctgggcttcggcggcatcgccatcggcttcatcgcgttggtggcggttgcgccgcagctgtccgtgccggcggtgttcgtcgccatgctggtgatgtacgtggcggtgggcttcatcttctcgccttcgcagacggcaggcctgcgggcgctgccgcctcagcagaacccgttcggcgtagcgctcatgaccacgttcgtgcagatcgctgcatgcatcgggccatcgttgtatatcggcatcatgtcgtcggggcaagcgggcgctgcggccgggggcgcttctgcggcgcaggcgaccgcggacgggttcgcgcttgcgatggtggtggccgcggccatcggcgtcgttgggttcgctttgtcgctggcgtatgctcgcgcggcgcggaagcgtgcggccgtgcaggccgtggaacgcgcggcgcagccccaggcgctgtcggtgcttgcgtccatcatggaggctgacccctacacgctgccggccgccacgccggtgcgcgaggcgatgcgcgcgttcgtggatttgagggtcggcgggttgccgctggtggacgagcaggggcatccggcgggcttcgtgtccgacggcgacgtgatgcgctacctggccgacaagcatccgctgatcacgggatcgtattcgctggtggaagccgccaacagccagacgttcgacgagcgcctgcgcgagctcatcgagcttccggtgagcgcgatcgccaccgacaagctggtggccatcgaggccggatcgtcgctggaagaggtgtgcaacctgttggccacgcgccgtttgaagaaagtgccggtggtgcgcgacggcgcgatcgtgggcaccgtcaaccgctccgacgtgctgcgctacgcgatggacacctgcctgcagggagtgtaggggagacgtctggcttcgtagggcgctgcagggcgccggccggcttcgcagggcgctgcagggtgctgcagggcgccggccggcttcgcagggcgctgcagggtgctgcagactgccggccggtttcgcggggtgctgcaggatgccggtcggcttcgcagggcgccggctggcagagattgcacgctatgcacgattctaagccgcatttttaatgcggtcgggaagaaagcccaggtcgtaaaaaactaacgatgaaaaaatcgtgcatagcgtgcaatctctgccagctacggctcggtccgccgttaaaccaggattggcatagcccggatcggcccgtcccgcgaaagctcgccggcggctcggaagccctcctcggccatcggccaggcgctcgtcccgcccgatcgccagccgcccgacaggggaagcggcgtgcggcggtgcatgtcgatcccggtttagcagcggacgacctcgcttcgactgccaaggatgaagcgggttcgctgccggctttcgatcgcattcagaacccgagcagatcgcggcgaagctgtcggttggcgcgcgtgaaatcgggatcgacgtagcgaaggcgctttccggtgtgttcggcaacggtgtgcgcgatcgcgttcatgcttccgccgttttcgagttgccatttcgtgacggtcagcacggtgattcccatcgacaccagggcatctcgtctcatcgagtccttcagcatctgctctggatcctcgtggtttccgccgtcgtattcgacgtcgagtttcgcttcaggccagtacaaatcgcacacgaggtagttcttgccggcaatgcgccgttcccgcctgcccaagtcgatgcgatggttgagcagcggctgcttcaggccgtaacctcccattcggtacggcagcgtgagaagcatcgtcaggatcgtctcgcgcgatgaggccgatccgttcgccacatagcgaagcgccttgatcgccttccttttgccgtgcgtcttgtcgaggctgtttgcatacgcggtaagcttttcgacgctggtcagcggcgcgcacgttcggtaggagttgtcggagaggtcgtaggctccgcatagctcgaagcccagttcgataagcttcggaagattccataacgtggccatttgcacgaaacacaactccggggagcatacgcggaagccgttcatagagtcgagggtcgagcgtggcggcaacgttccgccttccacatgactgacggcctcgttcgaagctcgacgaacggagttgtgcggtacgagcacgtgcaaaggacgttcgagccaccatggccccggttcggcaagcgatccttttcggggaggttcgtcgagaagcggtcgggtatcttcgatggcgcgaaaacttcgctggccgatgcgaaccgatctccagtattcaagtgcggatgtatgacatagggttggctccattggctcatgatacgtggtcgatagcaagatgggaagccggttggcagagattgcgcggtatgcacgattattgaggcttgttatcggaagaaaagagagaaagcccaggtcgaaagaaatggcagtgtcgaagaatcgtgcatagcgtgtaatctgtgccacgccgaggacgatctgctgtagaacgggagccggaggtgcgcgcgtcggcccgcgcgcggcggccggggtcgcgtgctcggccggcgcacatgcggcggccgctgccgcgtacggcatccggcacccgtgcatgtcggccgctgccgcgtgcggcatccggcggcgcgttgccggtcgcctgtgcgcgtgttctgcaatcggggtgcgttccgcttgacatcgtaccgcgtcgtactaaaatcccgtttagcactcgaagtccgagactgctaaacgggcagaccggcaggtacgaaaaggagagcgacgccaactatgcgcaagttcaaaaccgagagcaagaagctgctcgacctcatgatcaactccatctacacgaaccgcgagatcttcctgcgcgagctcatctcgaacgcgtcggacgcggtggacaagctgtacttccgcagcctcaccgacaaggacatccagctgagcaaggacgagctgggcatccgcgtggcgttcgacaaggacgcgcgcaccgtcaccgtgtcggacagcggcctgggcatgacgaaggacgagctcgaccgcaatctgggcaccatcgcgcactccgacagcatggagttcaaggccgacaacgccgacgcccagggcgacgacgtggacatcatcggccagttcggcgtgggcttctactccgcgttcatggtggcgtcgaaggtgcgcgtcgtgtcgaaggcgtacggcagcgacgaggcctgggcctgggaaagcgacggcgtggagggctacaccatcgaggaggcccagcgcgagggccacggcaccgacgtcatcctcacgctgaaggacaacaccgacgacgacaactacgacacgttcctcagcgagttcggcttgcggaacctcatcaagcgctacagcaactacgtgcgctaccccgtgcagatggaagtgtcgaagacgcgcgagctgcccaagcccgaggacgccggcgacgactacaaacccgagtacgaggattacaccgaggtcgagaccatcaactcgatgatccccatctggaagcgcagcaagtccgaggtcaccgacgaggagtacaacgagttctacaagaccgacttccacgacttcaccgacccggcgcgcacgttcagcatccacgccgagggcgcgctcagctacgacgcgctgctgttcatccccggccgcgcgccgtacgacctgtacagcaaggacttcaagaagggcctggcgctgtacagctccaacgtcctgatcatggagaagtgcgaggagctgctgcccgaccacttcaacttcgtgcgcggcgtggtggacagccaggacctgcagctgaacatcagccgcgagacgctgcagcacaacagccagctgcgcgccatcgcgaagaagatcgagaagaagatcacgtccgagctgaagaagatgcgcgacaacgatcgcgaggagtacgagaagttcttcgagaacttcggtcgcggcctggagttcggcatctacaacagctacggcatgctgaaggaccagctggccgacctgctgctgttctactcggccaagcaggagaagctggtcacgctggacgagtacctggaggccgcgccggccgaccagaaggccatctattacgccgccggcgagagcgtcgagcgcctggccaagatgcccatcgtgaagacggtgctggggaagggctacgacgtgctgctgtgcacgaaggacgtggacgagttctgcttccagtcgatgatgacgtacggtgcgcccgcggccgacggcgaggatgcgccggagccgttcgagctgaagaacgtggcgtcgggcgacctcgacctggcctccgaagaggagaagaaggaagccgaggagacgacgaaggacaacgaggccctgttcgccgctatgaaggacgcgctgggcgactcggtgatgaaggtggcggtgtcgtcacgcctgaccgatgctcccgcttgcatcaccgcggccggtccggtgtcgctggagatggagcgcatcatggcacagatgcccgacggcggcgagggcattaagtccgagcgcgtgctggaagtgaacgcgaagcacgcggtgttcgacgtgctgcgcgccgcgcaggaagccggcgacgccgacaaggtgaagctgtacgccgagctgctgtacaaccaggcgctgctggttgagggcctgcccatcgaggatccggtagcgtatgcgaacgcggtgaccaagctgatggcgtaacttggttccggcggcttgccagccgccggaacagctcgacgctgcggtccgctgcggcaccccgtcttcgcgcgatcccggaagctcgcgtaccacagtatcccctacggggacttcctgcggggcgcgcttcgcctccgcgatcccacgaatgcgaggcaccgcagcggccctcgctgtcttactacgccaaccggggcgcgcattatgcgtcctgcggacgcatagacgggtcgcttcgctcccgtctgtcatcctgagcggctagcggcgcgcgcttgcgccggcgcttacggcgacggctcctgcgactgtggcgaccgcggcggctccaacgactgcgacgccgaagggatcgccggtgctcgccagcggcttgccgccgggggcggcgggctcctcgacgggctcgtcggtcggctcgggcgtgggtagcggcgtaggctcggggtcggacccgcccttgatcacgatgcgcccttggccgtccggatcggcgtattcgccgccgatcgttcccttcaaatcgtactggatgtactcgatgagcgccttgttgtccaaatccagcagcacggcttcgtcgttcatgaacatggtgaggccgtcgccaccgtccaccagcaggaacgtgtgcgacaccagcttgtagcgccggttcacgtcgaggggctcgccgttcaccagcacgttgcggacgcggtactcgcccgccacgccgccgaatttgccgcccggcatctgcaccgacgacggaatgtccgtgcgcacggtgtacgtgaggcccgccgcatgctgcaatcctccgctgggctcgggcagcttcgacgcgcccacttcgagggcgtcgaggatgttctggccgagggtgtccacgtaggccagctggttgttgaacggttgcacgtcgatgaggttgccgtacgtcacgtcgcccggctcgatgttcgcgcggatgccgccgccgttcacgagtccgatatcggccatgatgccgccatgccatgccagcgcgaggtacgcatcggccacgaagtcgccgaggttcgtctcgtgcgcgcgaacggcccaggtgtagtcgtcgtcctcgagggcgaccaagcgcacgtccgagcgcccgatgacgcgcccggtgatcttcgcgagatccgcttgcagccctgcgatgcaggcggccgtgtcggcatcgacgccgtcccaagccttgatgatgctggcggtgccgttcgtcgtggatgcggtgacggtttcggtgccgtccgacgcgtaggcggcgatggttccggtcgcggggttgatgaccacctggccgatgcccaccagctgggtgcccgtctgcgtgaccagcaccggttggccgttcttgttgagcggggtctgaacgtacagctcgtgcgaatggccgtcgatgatcacgtcgatgccgctcgtgttcgccgccacggccgcgctggtccagcgcggggtcacgccgccttggcccaggtgcgccagcgccaccacgtagtcggcaccgtcggcgcgcgcttggtcgacggcgcgctgcacggcgtcgtacagcttcgcgccggagtcgtcctcgcaaaagccgtaacggtaggttccgccttcctggaagtgggcgggggaggacttcgtcagcgactcgggcgtgcagatgcccaggaacgcgacctttttagtgtcggcgcccgtgccgtattcgcgcatggcgtacgcgtcgaacatgaggttgcccgtgcgcaggtcggtgaagttgcaggacaggtacttcgcgttcgcgcgggcgactagcgtgttgaactgggccatcccgtagtcgaactcgtggttgccggggatggcgaagtcgtagccgcactcgttcatgatgtcgacgaggtactcgccgtcggtcagcgtgcccatggccttgccctgcacggcatcgcccgcgtccacaagcgtcacgttgtccgcgccgtaggtcgagcgcatggtttttgcgtagttgacgagcttcgcgtatcccaggttgtcgtccacggcgcagtgcacgtcgttcgtgtgcacgatgacgatggcgccgggctgcgtcgcagtggcggcggttgccgcttcatcgccgaacgcgcggcgggcgggaagcgcgagcgaggccagcgcaacggcggacagcgtgcagaacgatcggcgggttatccgatggggagcgggcaggtgcgtcatgggtgcctcctcgaaacgagcgcgaaaacgcggttcgttcagtataccgtgcgaggtgcgcgagccggaatccccgatttcgagcgtccgcgagcggcgctcgtcggctatactcggcgcatggaccagcctcgcacttacaccacctcgcgcatcgcgagcgccgtcggcatccacccgaacacggtgcgcctctacgagcgcatcgggttcatcaccgcgcccgagcgccttgcgaacggctatcgcgtgttcacggacctgcatctgctgcaggtgcggctcgtgcgcgctgcgctcaacgtcgagctggtgcagaacggtctgcgccgggaggtgctcgccatcgtcgaaacgatggcgagccagcgctacgacgaggcgatctcgctggctcggcagcgtatcgaccacctgcggcgcgagcgttgtgccgccgaggatgccctgcgccacgtgcgcgatctgctctcgcgctctgacggttccgcacgcgccgaacggcttatgctgacgcgcaaggaggcggctgaccagctggacaccaccatcgatgcgctgcgcaattgggagatgaacggcctgttgcaggtcaagcgcaagcagaacggctatcgcgtgtacagcgccgccgacctcgaccgcctggccatcatccgcgcgctgcgtgccgcgaactattcgctggccgccatcctgcggctgctcgacgcgcttgaccgcgatgcgaccgccgacatcggacacgtgctggaccatcccgatcccgacgatgacatcctgtcggtatgcgatcgtttgctgacgtcgctcgatgcggcggagcgcaacgccttcgagatgatcgagctgctcgagcgcatgaaaaaactcgcctgaacaaaccctccactttgccaccagagttggcgcgtcttctagtatcttcggcgaccgaaagataggaggacgtatgaacgacgttgtacacgtacgtgatctggtgaaaacgtacggaggcgtgcctgcggtggacgggatcggcttcgacgtggccatcggcgagacgttcgggctgctgggtgcgaacggagcggggaagaccacgacgctggaatgcctgctgggcgtgagtcgccccgacgcggggagcgtcacgatcttgggcttggatccgcgaacccggcgcaaggagctgttccagcgggtgggcgtgcagttccaagaagcgcgctaccaggacaagattacggtggacgagctgtgccgcgcaacgcgcgcgctgtatcgcgaagccgacgacccggcgaagctgctcgcgcgattcagcctgaccgaggtgcgcaagcaagccgtcgagtcgctgtcgggcggccagcgccagcgcctgttcgtggtgctggcgctcatcccgcgtcctgaggtggtgtttctcgacgagctgaccacggggctggacgtgaaagcccgccgcgacgtgtggaatctgttggacgagatgcgccagcagggtatgaccatcgtgttgaccagccacttcatggatgaggtggaagcgctgtgcgatcgcgtcatcattctgcgcaaggggcgcatcgtcttcgaaggcaccgttgccgaagctgtggcgtccggtccgttcgccagcttcgaggacgcgtaccttgcgtacgcggaacctgccgaacacgctgagtccgtggaagctgccgagcctgccgcaaccgcccatttctccgagggaggcgcccatgaaagcctttagcaccctgttccgagtcgagttccgcctgtcgctgcgcgacatgaacatgcccatcttcgccgtgatcatgcctgtggtggtgatgttggtcgtcggcatgatgttcggcgatcagcctgcctacgagggcgcgagctacacgttcgtggcgcaatcggtgggcgcggtgtctgccatcggcatctgcgccggcggcgcgatgggcctgccgctcgtggtgtcgaactaccggcaccgcaagattctcaagcgctacttcgtgacgcccgtcagcgtgcacaccattctggcggtgcaggtggccatctacaccgtgtacgcgctgatctcggccgtgctcgtgttcggggtggcggcgctgttcttcggctacgcgttcaccgggtcgtggccggcgttcgtcgggtcgtacgtgttggtgctggcggctatgctggcgctcggcatgatggtgggcggcctcgcgccgaacgagaaagtcgcgggcgtgctggcaagcctcctgtacttccccatgctgctgctgtcggggacgacgctgccctacgagatgatgcccacggccgtgcagcgcggggccgacctgctgccgctcacccagggcgtgaagctgctgaaagccacgtcgctcggactgcccgtcgaccaggccgtcgtgccggtggcgatcatggcggtgtgggccgcggtatgcaccgtgatcgccgtgcgtttcttcaagtgggagtaggcatactgggattcgttgcgtccggcaaggcatagaatcccatcgccatccccgatgtttcctaccccaccatgcgggcgcgggcgtattcttgggcgtcggctatgtaggcttcttgggagtgctcgatgttgcgggccaccgtctgggcgtcgagcgtgcggatcaccttgccgggcacgcccacgaccagcgagcacggcgggatcacggagcgctccttcaccagcgcgccggccgcgaccatcgatcccgcaccgatcacggcgccgttcatcacggtggcgtgcatgcccacggtcacatcgtcctcgatggtggcgccgtgcacgatggcattgtggcccaccgacacgcgatcgcccagcgtgacggggcagtcgtagtcgctgtgcagcatggcgttgtcctgcacgttgctgttcttgccaatgcggatgggcgccacttcgccgcggatgacggcgctgaaccacaccgagctgccctcgtccatcgccacgtcgccgcagatcgccgcattcggcgcgatgaacgcggctttctccacgtcggggaacatccccttgaattcaacgagcatgccggttcctttccttcgggtacgccgtccagtatcccgaaggaacccccgccccgcatcgcaagttccatgcgatttagggagggcgacgtagtttgaaccggcatcgtcaaagcaagcgtaacgcgtccgccacgggcgggcgacggcgggggctcgggcggcttgggacgcgaccgggtgcgttatggtcgcgggatgatacgacgaccctgcgcggaaagaaggctcccatgtacgacgatctcaagggcaagacggtggtggtgacgggcagctcgaaggggctgggcgccgccatggcgcggcgcttcggcgccgagggcatgaacgtggtggcgaactaccgctccgacgaagagggcgcgcgcgaaacggtgcgagccatcgaggaagcgggcggagcggcggccgcggtgcaggccgacgtgagcaagaacgagtgcgtggacgccctgttcgacgctgcgatgttctcgttcggcggcgtggacatctgggtgaacaacgcgggcatcgaggtggcttcgccgtccgatcggaagtccatcgaggaatggcagcgcgtcatcgacgtgaacctgaccggcgtgttcgcgggctgccgccgcgccatcgatcactttctggatcgcaagatgcccggcgtcatcatcaacctgtcgtcggtgcacgagatcattccgtggccgcatttcgccgactatgcggccagcaaggcaggagtcggcatgctgacgaagacgctggcgctcgagtacgccgaccgcggcatccgcgtgaacgccatcgcgcccggagccatgaacacgcccatcaacgcggagaagttcgccgatcccgaagcgcgcgccgcaaccgaacggctcatcccgatggggtacgtgggcgcccccgaagacgtggccgccgccgcggcctggctcgcgtccgaccaggccagctacgtgaccggcaccaccctgttcgtcgacggcggcatgacgctgtaccccggcttccagttcgggcagggctagggcgacggctcagaagaggtcgtcgtgaccgccggttcgcgcgaagccgaccacgccatcgactatctcgtacatgatcaaccagtcactggttcgtcctttgacgtgaagctctcgttttccttggaggttgccgcttaaagcgtggtcgttgtatttcaaaggtatgggttcctcgtcggaatgaagaatggcggatatagccgccttgaaagaccccatgtcccagtgcttcttcatgcattttttgacatcgcgctcgaatgccggggagttgatggagcgatacatttatatccctaaggcagcgaagagctcatctgcgtcttcgtgcgtcctgtgcgagggatcttttcttatctcctccaactctcggaacgcttcgagggtttcctcgttgggctccttggcaagaggggcggggcttatgaccaaatagggcgttgaacccttgaaaacggtgaccgacttgcgcgtttcgcttacttggcggccaattttggtgaagttcgctcgagcttccgatacgctcacggtatttgtgatggacatagcgtctcctttcgatcggctgaatcaaaaatagcataactatagctataaatctagctatagttatgctacagatatttgcccatcatggtcctgatgcgatttgggacgagttggtggagatggcgcaagctcgccgcagcgcgtccgcatggcgttgcggcgcttacccggccttcacggcgcctttgtcacagcggttgccccaggagtcgatgatcttcccgtcgcggtagacgcagatgatctcgcagtggttcgcgcacttctggcactccacctcgcgggtgacgaactcgaacgtgcgcaacgcgtcgaagtcgaacgcctcgccgtcgccgggctccccggcgcgcggagcggcctcggcggccagcagcgccacgccgaacgcgcccatgaggtggccgtcctcgtccacgaccacgtccatgcccagctcgtcgcggaacgcctgcaccacgccggcgttcttgctcacgccgccctggaacaccacgggcgcggcgatctgcttgcctttgcccacgttgttcaggtagttcgtggccaccgcgcggcacaggccggcgatgatgtcctcgcgcgcgtagcccacctggatcttatgtacgaggtcgctctcggcgaacacggtgcaacgcgccgcgatgttcgcgggcttcttcgaggtcagcgcgatgtcgccgaactcttccacctccacgcccagccgatgcgcctggctcgacaggaatgcgcccgtgcccgccgcgcacagcgtgttcatggcgtagtccacggcgatgccgctctccacgcagatgattttcgagtcctggccgccgatctccaggatggtgcgcacgtcgggatgcaaaaacgtcgtgcccaccgcgtgcgccgtgatctcgttcttcaccacggtggcgccgcacatggcgcccaccagccgccgcgcgctgccggtggtgcccacggcgcgcacgcgcaccgcgtcgcgatccacctgcgagcccaggtcggccaccacgcggcgcgcggcatcggccgggttgccctcggtccacaggtacgtgcgcgcgatgatgcgccggtcggcgtcgatgatcacgcccttcgtggaaatcgacccgatgtcgatgccgaggtagcagtccgttcgccctgacgggacggggcgtccctcgctggcgttggcggtcgtgtgagtttcccttgcttcggtcatcgggccgtcttctccttcttcatggcgatcatgtcgtagaacgcttcgaggcgcgtgtccaaaccggtgtcgctggtctgcgagtcgtagctgaggtacagcacgggcacgccggtgtcgcggctgatgcgctgcagcacgggcatgcagtcgacctcgggcgtgcagcccgacgacttgaggtgcacgatgccgtcgaacccttcctgcgcgtacttgcgcgcggccgcgatggtcatgctggacgtggggcccatgtcgtactgcacgtactccgagatgccggcgcgcaggttcttctcgttgtagcgcaggttgcggttcgtcatgttcagcgctcggtgcagttccacgcccatgtccaggaacttgcgctccagatcaaggttgctggctgggtcggctgcggtgaagtactcgcccacgatgcccacgcgcaaggggcgggcggggcgatgctgcggcagcgcgcgcaacgcatcgaggcccttccgctgcgcttcggcgatctcgcgctcgttcgtggccgcgcgcatgtcggcgaagtacgcctcccgcgcgcgctcgaacgacccgggctcggcttcgaacccggcgttcgccaggtagaaatcgttcacttcgtccaggtgctcgatcattttaaacacggccagcatgttacgcacgccatgcggcaccgacaggtctgggttcaccttcttcttgcataccgagatgtactcggtcaggggcttgccggtgagcatggcgaagttcagcatgtcgaactcgtagcccagatcgcgcatgatggattgctgcagctcgccgtaataccccaggcggcagggcccggcgaactgcaccagcacgtcggcgcccagctccagcgcctcgatgtagtcgcccaggatgtgcttgaacggcgcgcacaccatgtcgctggagtggcgcgagcccagctcgatggtgcgcttcgtgggcttcggcagtgcgacgaaatcggcgtccagcacgtgttcgacgaagaatttgaacgcgatgtcgtagtagctgtagcggaagaacgccacgcgcgtgcgggcgtggcgttcgcgcttggcgcgcggcttcttcggcagcgagggcagcagcttgaacgggccgcgccgcgtgcccaccaccacgcgggcgccgcgcacctcgcggtcgccgtcggtgtgcagcgggttcaccgcgtcgcgtttcgtctcaggcgccaacgtagccccctttcttctggtagcgcaggatgtcgatgaagctctcgacgcgcgtctccaacccggcggtgccgctttgcgcgtcgatggtgaggttgagcaccggcttgccctggatgcagcgcacgatggcgtcgtcggtcatggagtcgggcccgcaggggaacgcgctgaccagcacgatgccgtccacgcggtggtgcagctgcgtgatggcgccgatgatctcgcggttcacgatccacggcagcgtgtcggagaagtcgaagctggcctgcagcgagcgctcacggtcggcctcgtcggcgaacagcaccacggcgttcatgctttccagcaggtccgtcagcgcgccgcccatgaacgcatcgtgcgcgaggtaggggtgcgctgccagcaggatggcaagcggtgcgtcctcggggcgccgcgccgccgcccgcgcggcttccagctgggacagggcgcgcgtttgccgcaacgtcgcggcgcgttcggcctgctcctgcgcgcgggcggccgctttccaggcgcgcttcgcctcgcgcgggcccgtgtagcgctgcgtggccagctcgatgagcgcgtctttcatgcttttgtgttcatccacctcgttcaccaggcacgacagtacttcgatgcgctggtcggcgaaggtattggccacgaggtcgggcagcgcctggaacttcgtgcagaacccgcgccgtcgtcccacgttggcgatgctgggcacgaacacggcatcgcacgcgtccgaatccaccagcgaggccacgtgtcccaggtagatcttcgaggccaggcagcactcgtcgttcgacagcgcgtccccgtgcgccacggtggagcggtcggtggggtcgctgagcacgacgtcgcagcccagcgcctcgaagaacgtcgtccacagcgtgccgtagcggtagtgcaacagcgcgcgcggcatgccgatgcggcgcgggccgtcggcggcggcgcggagggggaacccgggtgatgccatgcgtgctccttgggcgaggtggtttgatctgcagagccggagcccgatgacggcgccgttcttgcctaacgcagcttacaccaacagtcgcgcggcgctcgaaggcacgcccaagcgacatgctttcttcgcggggaggggtgttgcgttggtggcgggttgcttggggggtcgcgttggggacggcggtgggtcggcggcgggttgcttggggtcttgctggcgacggctcgccggcgggttgaaggcgagctggtggcgggtcgttcgagggggcctcgcctccggttgactcgcgcgtggcagagatcgtacggtatgcacgattctccgccgccgccgtttctcgcgacctgggcttttcctttccgcctccgaaaacgaccacctgaaatcgtgcatagcgcgcgatctctgccacggcgttcctccgttcgccgtcggatcgatgcggatgcgagtctgccgggctcctgcggcgagccgctcgagcggctcgcgtctttataggcgctgcgacggagggtgcgcccctccgccactcggtttttccgcaggaggtgggatttgcggaaagcgcgtaaaaccacccgtccctgcgacgcgctgtgacgcagcttgcgccgatggagcccctttcgcaaagcccgtaagcgacgcgcgcccttcgtgcgatcagaggcgctcttctcgcgcgttttgtgctcaggaactgctgttcaaaagatagttgaacggggcgcgtctcggatgcaacgacctaggagcgcggtagaatctcaaaaaggatcggcgcgcgataggttcgaggtagactttttgaatatcaagcaagtaagatacttcgtcgctgtgttccagagcggcagcttgtcagcggccgcaaaggagcagtacgtaaccgtccaagcggtctcgaaggctatcgctgatctggagcgagaactgaagaacgagctgttcgtgcgcgaaagccgcggcgtgcatcccaccctgttcggaaaggccttctacgtcaaagccgagccggtgctgagaagcttcgacgagttggaggcgtttgcgcacagacgacgctctgccgaatctccgttgttgcggttggggctgtgcgcgtctccgctctatggatacgagcaagcatgcgccagcattgcatcgttcgtctacaagaactcgggcatcgaaacctctatacggcttgaggcggggcttcgcggcttcggggcgctgcaggcgggacacctggatgcgcttatcgtggttggcgcatgccgtcaccccgatatggattgcctgaatctcggcaaggtgatgctgggcgtgattatgtcgtatcggcaccccttggcgcagcatcaaactgtcagcttggacgatataaagccgtaccccgtctccatatcggaagacttcgaccgcttcaacgattccgttgcggagttctatcgtgagcgcgggatcgatattctcgtcagcgcgactactgccgcgcagttcgagcgctatctgacgcgagagaacgggttggcgctcaccgttggcgttcctgcgctcggtcagttcaaccccctcaccgagttgaaacccatggcggccaaggattccgtttccgtgcctatctgcctcgtcagcctcaaaggacgcaaggcgcccgcctatgcgggcttcgagcgctggatgacgaacgagcttgccgtcaaaggcggcgatccggtcaggaggttcgtgtccacgacggcttctactcctgcatgttctgaggcaggaacaggttgttgaacgcctcggtcatggacgggtgcgtgaatacggcgctctgcagcacggaggcgggaatgcgtgcatccatgaccagtttcacggtgttcaccagctcctgcgcatcttcgcagaacagatccatgcccagcagcactcctgagttcgcgtctaccacggccttcatcagacccaccgggtcttgcaggatgcgcgcttgcgagattttttcagcgggcagtttgtatacctgtacggaatagccggctttgcgcgcctcgtccgcggtcatgccgacgcgcgcgaacggcgggtgcacgaacgtgcaataagggatggcgccgcggttcttcgtcgtgcgcgatccgtcgcccagcaggtcggatgcgacgatgcggaagtcgtcgtaggcgatgtaggtgaattgcatgccgcccgtcacgtcgcccatggcccagacattgtcggccgtggtgcgcaggtgctcgtccaccttgattccgccgcggtcgttcagctcgatgccggcggcttccaggttgaggccggtcgtgttcggggtgcggccgaccgcgaccagcacggcatggccgggatagcgcttctcctcgccgttcacctgggcgaacaccagcacctggtcgtgctcgtcgtcgatgtgcgtcacgtgcgcgtcgtacacgatggtgacgccgcggtcttcgaggctcctccgcacggcttcggccgtctcgggatcctcgtgggcgaggatggcgtcgctgttttgtaggatggtcacctgtgcgccgaagtcggtgtagaacgaggcgaactcgaggccgacgtagccgccgccgatgatgacgagctggcgcggcagggtgggcagctcgatgagcgagctgctgacgaacacgcgcgggctgtctatgccggggatggaaggcagcttcggcagcgagccggtgtcgatgaagatgcgcttcgcctcgatgctgcgcgtgcccgacgcggtggccaccgtcaggtgcgtggcgttcgcgaacgatgcgcggccgtcgatgacgtcgacgttctcgcgatcggccagcgcgcggtagttgcgttcgcgcgaggcggagcgcagttctttcatgtcgtcgacggccgcggtgtagcgctcctcgcgttcaacgatagagccgcctacggccgcggtcagtcgtgccgattccacgagtgccttcgtggggatgcatgcgttgttcacgcaggcgccgccgtacatggtgtcggactgctccacgactacgatgttctggccatcgtcggcaagcgcaccgcccagggcgaggcccgccgttccgaacccgatgatcgctgcgtcgaactgttccatggtgcgtcctttcgtcgagaccctaaagggggccgctctattcggggcatgttgcacgctgccgaagatgtttatcgtagggcacccgaccgcccggctggcgatggccggcgatccgcgcgaaagcggtcatgaaagcgtggacaacttgtttccctgcccgcgctgaaagccctatactggaggtaggacgttttcaggcggcgcaccgcgctcgccgcgaccgagaggaggcccaccatggccgttaacaagttgctcgtggcgttcgacgaatccgagggtgccgaccgcgcgctcgccatggccgccagcctggctgcagtgaatcccgaggcgcatgtggacgtcgtgtacgtggtgcctatcccgctgctcgacgaaacgcagatggcgaacttcaaggacattctcgacatgatgatctccgacggcgaggatctgctggccgaggccgagcagaagatgggcgaggacgttgccgcgcgcaccgactcgctgctgctaaccggcacgaatccggccaccgagattgtcaagctgatcggccagcgcgactacgacctgctgattgtgggcaaccgtggcctgagcgggctcaaggagtacatgggcagcgtcagccacaagctgttgcacgcatcgcccatccccgtgctgatcgcgaaataaccttccgaacgcgaaacggccccgggcaatgaggccgtttcgatgagacaaagggacggggctattgtctcattcgcgtgattcgcgggcgtttcgtgcgggtgcggcggagcttggacagggatccgccgcatccgcacggctttgacgcgtgcgccgacggcttgcggcgcacgttcccctcccgttctacgcatgttcgcggacgctcggtctgacgagcgtttcggtttgtcgccttggagatccgtgcgcgttccgcagttggcttagcggagcggttgcccatacctgtccacgtgtcgtttccggcgggacacgcacggacctccaaggcgacagattctactgcgcgtcgcctgcgaagctgcctggctcggttccggccaccttttcgccgttccagtcgacgatgccgcccaggtcgaacacgtgcttgtaacccaggttgagaagcatgttcgaagcgtgttcgctgcgcacgccggtccggcagtagacgatgatggaggcgttttcgtccacgccttgaaggccggcgggtttgacggagccgatggtttcgacgggtatgttgatggctccggggatgtgcccgtcagcatattcgcgtgcggtgcggacgtctacaagggttgcggagttttcgctcatcatggcaaccgcctcgtcctcggaaattgtggcgtacccgccgttgcgttcgtttgtcatggattcctcgcttttgctttggttttgaattgcgggcgcgtcggatgatgcggcgggcgtttccgcgcatgccgccagggtgagcgctccggctgcggccagcgtgacgacggccagcgccgcgtgttttctcatacggctattcatgagctgcaacgtcctcctaaggggagcgctagggtcgacggtaagtaactgtaacgctattgcatacagattacaaagtcaagcatagtattagaattttacgaacatgcgatatcgtcttcacaaggcaccgcgctgtctgcttgacggcccttcgtgccccccggctggtctcgcaatggcaaaaagataccgaattcggaagcgagcgggcgtccctgttcggcatcggcgcatgatgctggagacgggatcgttttgaccgggcgttatcgggagaggccctttcctgctttctgaggagaggcgcagcgacttccgaattcgacgccttttcgccattggccgtgctgtcggttgcacggaggcggccgcgggctgcgagacgacgacggctgctgctggcgcgaggcatagcccgcggctcggcgaagcgctggctatgcgcgcaaggatcaacaagcgtacgaatgtttcacgtgaaacattcggggtcgaacaggagaaggagcccgaacgacggttttgagagccggcggccacgatgcggctgcgacccgttcgtatgcaaagcgccctccggcgagagccggagggcgtgaggggagggaaggcggtgtgatgacgctcgggcgtcgggcgtgccggctcccgagcgttcggcgcgttacgcgccgtagtactccagagccgactgggcggcgatgcggccggtgacggtgcccatgcacatggacgagccgctcacggcgtagcgcatgtagaacagctcggcgttgcccagcgtgccgccggcatacaggccggggacgggcttgcggtcggcgtccagcacttcggccttcgtgctgatggccagctggccgaacgagtcgttcgtgttcggtgtgatctggatggcgtagaacggcgccttctcgatggcctgcaggtcttcgggcttcttgtggaagtcggcgtcctcaccggcctcgcacagctcgttatagcgctcgatggtcttcatcagcgggtaggagggcagcccggccgcctcggccagctcctcgatggtgtcggccgtgtcgacgacgcccttctccacgcccttcttgataagctccatgcgcttgtcgggctgctgcgagtcgcagatgatggtgaattccttgcggccgctttccacgaacggcgtgaagtaatcgaactggctggtcatagactcgttcgcgcaacgatagcccaggtcggtgacgaacacgcccgtgttcaccatgcgcagcgcgctcagctcgtcgttgaggggcagcggttcgcggcccaccaggtggatctgcgacaggccgcccttcagcagcgtcatggcgccggcctgcttcgccagctcgatgccgtcgcccgtgttgctggggctgctgaacgtgtgccaacccacggcacccggcgcgtacagctccttcgcccaatcctggccgtcgaagccgcccgaagccagcatgacggccttcgcgttgatggtgtactcggtcttgccctggcgcgccttcacgcccgcggccttgccgccgtccatgagcacttcgatggcgcgcgtttccatcatgatttccacgccgttcttctcggcttcggcgatgaggttgtccacgatgcccttgccgctggtggtcgacagcatggagcggtcggacacgttgtcgccgggcttcttgtcgaagtcgcagcccagctccaccagccaatccatggccgcgccgccgccctcggccacgaggcggcagatgtccatgttcgcgtcgccgtcggactgatcgaagaagaactgcgccacctcctcgggtgtgccatagtccgtgtagcccagctcgtcctgcttcttcgcgccgcagcaatagaagttgccggagcagatggacgaatcgccgccggtcacgttgtgcttttcaagcacgaccaccttggcgccggcgcgcgaggcctccacggccgcgctcatgccggccacgccgctgcccacgatgacgaagtcgacgtccttggtttcctgcttctcggccggggtctcggcggcggcttggatggtgtcgggcttctgggcgccggttgcgctcgacgtgttgttggcgcttgcggcatcggagccgctttcggcgcttgcgggcgccgcggtgctttgcggcgcgcagccggcgaggccgcttccggctacgacggctgccgtcgcgcccagtcccataaggaacgagcggcgcgaaacgcctgcggatgcgatgttctttccctctgtgctcatgatgatcctccctgttcgacgatgcttcttgtcggcggccgaccctcctccggtcgatccgctgtcgccatcctgccagggaacggggtcgccccgccagcgccaaagtgggtggattgcgaaaaccctccatagtggaggggtggagggtggaggcacgaaggcgggtcgggaggcggaacgctgctgcacaccttgtcttcctgagcgcagcgccgtaaggcgcggggtcgaaggatcccgtgcggcggcagctgcggcgcttccagttggcaccgcacgggatccttcgaccccgcgcttagcgggtctccctgcgctcgcttcgcgcgctcgggagttcgacagtctgctggcctgtcgaatgctgcgctcgctcaggacgacagcgggcgtccctccgcgtggagctcgacgcggtcgaggaggtcttgcttgtcgacggcgctgctcttctggtacacgttgtggatgtagcccttgatggtgttcggcgacagccccagctcgtcggcgatgtacgtgcgcgtgcggccttggcacaacaggatcagcacgtcggtttcacgggcggtgagggcatgggcggcggcgaacgagcgcagcagatcgacttgcatcgtgcgcacgtcgctcgtctcgggtacaggcgacgacgacggcgcttccttctgcgcgcgtcgggtttccagccgcttcgccacgatggggttgagcgccagcacgaacagcgacacaagtgagatgagcgcgagtcccgtcaccagcacatcctgcgcgatcaccgccgcgccgaacgcgacgcctccgaggatcagcagcgccgacgcccccagcgcaacgctcaggtacacccacattgatacgtggtcgcgttcgcccagcaggcacacggcgatgcgaacgttcatgcccgacaggtagaacgccacgaacacgagcaccgccgcaatcacgtgcacgatgggcgaagtgatgaacggcagcgcgatcagcgccacggccacgatggggaacaggatgtcgtacaaatcgcccaccgacaacgcgtgcttcttgcgcaccacgtacgccagcatgatgccggctgccagcaagatgtccagcacggcctgcgcggcgatgggcacgggctcctcgaccacggttgccacctggctcaccgcgccgaacacgaacgagaacaccgccaggtacgacaccgctttcacgaagtcgcccgcgccgccctgcgcgaggctgacgcgccgcgccgttgcatccatcggtgccgtgcgcgcaagcggcaacgccgaaaccacgatgatggccagcgcgaacagcagctcgaaggtgcccgatgcgacgaagatgacggccgccaccgccccgccgcacagaaacgacagcggcacggtgcgcgcaagcgacacctggccgcgctcgtgtaggctggtgatgcgcgccatccatgcaagctcggcggtggccaatccgtagccgatcaggctcgaggcggcgatggcgtacggccagccgccctcgatgagccccaccagccgcgcgaacatgagggcgttgcccaggaaggctgcggcgaaggcgctgacgatgcgcgcgcggcgcgtgggcttgcggcgcagagcgtaggccagcgcggtgccggccatcgtcagcgcgtacgcgaggaagaacagtgcgccgaacgcatcgcccgccccgtgcgacaggctcatctcctgaaggaacgtgctggagatcatgagggggaacgtcagcccgcacacgatgccgtatcccacggcgctgcccgcgagcgtgcgtttcgcgcccgcggattccggcttggtttcgtgctgcatatcccctccctcctcgttccccgtattctactcgacgcgcgcgccgagtagcggacaggtttcgcgcgcatgcaaaacgcatagcgcatcggaagggagagcggacggtggcgtacgaatgtttcacgtgaaacattcgcgttccgacgcgggagggcctcggcgaggacggcatcgcgtcggtggcgtacgaatgtttcacgtgaaacattcgcgttccgacgcgggagggcctcggcgaggacggcatcgcgacctgccaggccatcattccgcgccagcattcctcctctgctcgcgggcctcgttcgggcgttggcgggcttccccacgagtgcgcgacgctctgctgaccgttcggtttccgtgtgctgcggccgcatgctcgtccgcgcgaccgcgaccatactggaaaggatcacgcagcgataaggagcaggcatggaaggcatagaccggacggcgctcgcgcccgcggacgcggcgcgcgtgcacgaaagcgacgaacccgaaaccaccccgctgacctcgaccgtcgacgatgccgagcgcgcggcggcctttgatgcgccttcgaccgcagcacgctccggccatgtctcggcctcggccacgtccgacgcggcccgcgacgcggcggcgcgcacccgcgcgcacgagcttgccgcagcgtcggcgcggcagggcggcgtgcccgcgagcgagcccaaacccgagcattcgcgcggcgtggccgccgtgttcgctggcttgctgctggccatgttcgtcagcacgctgtccgagacggtgacggccaccgcgcttcccaccatcgtgggcgatctgggcggcgtcgaccatatgcagtgggtgaccacggcgtacatcctggcgtccaccgtcatgatgccaatctacggcaagctgggcgacctgttcggccgcaaatacctgttcatcatcgcgctgtccatcttcatcgtggggtcggccacgtgcgggctcgcgcccagcatggacggcctcatcgcgggccgcgccgtggaggggctcggcggaggcggccttatcatcctggcgcaagctaccatcgccgacatcatcccgccgcgtcagcgagggaagtacatgggcctcatgggctcggtgttcgcggtgtccacggtggtggggccgctgttgggcggctggttcgtgcaggtgacggggtggcgctggctgttcgcgttcaacatcccgctggcgctgctggccatcgcggccgtggcgttcttcctgacgaagcccgtgcggcgcgacgaccgcccgcctatcgacatcggcggcatgatggccatggccgtgtcggtgtcgtcgctggtgctggccacggcgtggggcggcacgctgtttccgtggatctcgccgcagatattcgcgctgttcgcgctgttcttcgtggcggcggttgcgttcgtgctggtggaacgcaaggcgaaggagcccatcatccccatgctgctgttcaagaaccgcaacttcgtggtgtgcacggtcaccggaatgttcatcatgctgggcatgatgggaaccatatcgtacctgcccacgtacttccagatcgtcgaggggctggcgcccgagcaggcgggtctcatgacggtgccgatgatggcgggcgtgctgatcacggcggtgggcacgggcttcctcgccacgaaaacgggccgctacaagtggatgcccatcgcgtcgtgcgccgtgacggccgtggggttcgtgctgctgtcgcagctgaccgtgggcacgccgctggtggtgacgggcgtgttcctgttcgtgctgggcttcggcatcggtctgggccagcagatcctcgtgctcatcgtgcagaacgagttcccgcacgccatcgtgggcacggcgacggcggcgaacaacttcttccggcagatcggctccacgctgggcgcgtcgctggtgggcgcgctgttcacgtcgcgcctgactgccgacttggccgccaagctgccgcacgtggacaacatcaacatgaaccgcatcacgcccgatttcgtgcagcacctcgacagcggcacgcgcgccatcatcacctcggcgtacagcgacgcgctcgtgcctatcttcctgtacgtggtgccgttgctagtggtgggcttcgtgctgatgctcacgctcaaggagcacccgttggccacgaaggtgaaccacaccggccaccctggcgacacggtgtagagcgagacatcaacctaccggcgcagctgccagaaggctacggcgctggcggcggccacgttgagcgagtccaccccgcaggccatggggatgcgcacggtgtagtcgcagcgggcgatggtgtcgtgcgcgaggccgtcgccctcggtgccgaacaccagcgccaggcgctcctcggcgttgagggcgggatcgtccagcggcaccgagtcgtccgtcaacgcgaaggctgcggtcttgaagcccagctcatgcagcagcggcacgccgtcgggcgcccagccgcccgtgcccgtcgcgcccgcgccggcctcttcgccgatgcgcgtccacggcacttggaacaccgtgcccatcgacacgcgcacggcgcgccggtacagcggatcgtagcaggcgggcgtcaccagcacggcgtcgatgccgagggctgcggccgagcggaagatggcgccgacgttcgtgtggttcgtgatgtcttccagcaccgtgatgcgccgcgctccgcgtacgatatcggccacgctgggcagctgcgggcggcggaacgctcccagcgcgccgcgcgtcagctcgaacccggtgagcttcgtcaactcgtcgtgcggtgcgacgaacacggggacgccgtcgccccagcgcgcggagatctcgtcgatgatcggctgcatcgcgggcagccatttcacttccatgagcagcgacagaggctccatgccagccgccagcgcgcgctcaatcaccttgcccgactcggcgatgaacagcgctttctccggctccagcttgctgcgcagctgcgcctcggtcagccgcgcgaacgcatccagccgcggatcgtccagcgtttccacgttctcgatcatcgggctgcctcctcgaagcatgcctcgcgcactccgcccgccacgtctgcgacgttcgccagaccgcgttcgcagaattcgtcgcaggtcatgatgtgggcgccgatgaaggccatgtcctcgatgttcgccgcctgcacctccggcgtgcgcgacgacgtgcagtcttccagcagcaccacattgtagtcgagcgacagcgcgtcgtagcaggtggtgcggatgcagttcggcgtggtggtgccgatgagcacgacggtgcccacgcccaggcggcgaagcaccaggtccagctgcgtggcgaagaacgcggagaaacgcggcttcgcgatcacgcggtcgcccggctgcggcgccagcggttcgtactcgtccagcgtgcgcgggctggcgcaggcgcgcgacacgggcttgccgccttccacccagccgcgatgccgcgcggcttccacatccgagccgtcggcagcgtactcgcggatggcgtggaacacgggcattcccagctcgcgcgctcggttgagcgctcgcgtgcaggcgggcacggtggctgcggctcccgccacgcatagcgccgacgaggagtcgaggaacccgtgttgcatgtcgatgatgatgagggctgctttgcgcgggtcgatcatagggcgctccttcgcacgatctcgaactggttcctattgtagtcgatgaggccgtcccttttcatccgcgacagctcggcgcacatggcactgcggtccaccgacaggtagtcggccagctcctggcggtcgaacgggatgacgaagcggctggcgtgcgcggcttccgcctggtcggagaggtacgacagcagcttggcgcgcgtcgtgcgcttcgtggtgtgctcgattttgcgcgtcagcgcgtgggtgcgcttcgccacgatgcccagcaggttgcggatgagccgggcgtggaacgcgcacgacgacgggcacatggtggtcacgcgcccgatgtccaggaacagcacggtcgcgtcttcggctgccaccacgttgatgtcgaaggccaggtcgggctcgcaggcatacacttcggcgaacgattggcccggtccgaacgatgcgaggatgctgcggttgccccagtagtcctccttctccagccgtaccgagccttccagcatgatacccatcgccgtggtgcggtcgcccacgcggaagaggtaggagcctttggggaatgtgcgcttccgcgcgcccaggcactgcagcatgggcgcgaggtcggcggcgtcgatgttcgcgaacaggggcgatcggccgatgaggggcaggtggtgttccatagggctcctttgttgtaaatacaacggaaatgcttgaaccagtatcgtagggtaagcgtcatcaggcaagcaagcgatgaccgagcgctgcgcactgcaccgtgaacggcatgcggcgcgaaggggggcagtcccctttcgcgccgctctggcggggtttgagcgcaggcgcaagagaggacgagacatgggcgatacggcgacgatgttctgcttccaatgcgagcagacggctggatgtactggctgcaccggggcgaccggcgtgtgcggcaagcaggcgagcacggctgttttgcaggacgaggtgacgggcgcgctcgttgctctggcgcgaaccgtacgtgctgcggggatgaacggggacgcgcggcgaacggcggacgatcttgcgatggaaggtttgttcgctacgctgacgaacgttgatttcgacgatgcggccttggccgacctcctcgcgcgcgtccatgccgagcgcgattccgttgcagcgtcggcgcaggtgggggctgcgcccgactacgatctggccatgctgtggaacgcacccgaggacgcgcgttcgctcaagtcgctggtgctgttcggtctgcgcgggctggcggcctacgcctatcatgcagcggcgctgggctatcgcgacgacgcggtgtcgtccttcctgcatgaaggcttggccgcgctggccgacgacgaggccgacgccgacgtgttgctgccgctgtcgctcaaggtgggcgaggtgaacctgcgctgtatggagttgctcgatcgggcgaacaccgagacgttcggcacgccggagcccaccacggtgacgcgcgcggtggaagccggccccttcatcgtggtctctggtcacgacctgcacgacctcaagctgctgctcgatcagacggaaggccgcggcgtgaacgtctacacgcacggcgagctgcttcccgcgcacgcgtatcccgagttgaagcgctatgcccacctcaagggcaatgtgggaaccgcatggcagagccagcgcgtcgagttcgccgacctgcccgcgcccgtcctgttcaccacgaactgcctcatgccgccggcggcctcctacgccgaccgcgtgttcaccaccggtcctgtggcgtaccccggcatgatgcacgttgaggctgcgcccgacggcgggaaagacttcgagccgctcatccagcgtgcgctggagctgggcggttatgcggctgcaaccgatacgaccggcacgttcaccacgggcttcggccacagcgccgtcctcggcgtggccgacaccgtggtcgacgcggtgaagcaaggcgccatcagccgtttcttccttgtgggcggctgcgacggtgcgcgtccgggccgcagctacttccgcgacttcgtgcagcaggctcccgacgacagcatcatcctgacgctggcgtgcggcaagttccgcttcaacgacctggacttgggcactatcggcggtctgccgcgcatcatggacatgggtcagtgcaacgacgcgtacggcgccatccgcgtggccgtggcgctggccgaggcgttcgactgcggcgtgaacgacctgccgctgacgctggtgctgtcgtggtacgagcagaaggccgtgtccatcctgctgacgctgttgcatctggggattcgcggaatctacctgggtccgactctgcccgcattcgtgtcgcccggcgtgttggatgtgctggtgcgcgagttcgacgtccgccccatcaccacgccggaggaggacttgaaggcgattttggcgtagctcccgaccatgcgtgcgaaggagcgaagcgaggtgctaaaaacgaaattgagttgagaatccggcgggtattccgaagttttctcaattggtttgagaaaacttcggaacgtttcaaagcggagctgtaccaagcgcgtcaaagcgtgtcaaagggacgggtgatttgacacgccttcgatacgctcacgaatggcgcgaaaggggactgtcccttttcgcgccacttagatatccacgcccaggaactgcttcaccaggatgccgatgacgaacgacagcgccgccacgcccaggctgatgccggccatctggccgaatcgtttcttgaacggaagatcctgcgccaccgagagatagtagttgaacaccacgagtatcagcagcacgatgactaccatggtacccatggcccacaggtagtgcgactcgtcgaacagcaggtacggcagaatcagcagcgctaccgtcacgaggtaggcgacgcccgtgtacgaagccgacttcagcgcgtcgggacgcccctcgctcttcgacgacaggtactcgctcgacgccatcgacagggtggctgcgatgccggtgatcagacccgaaagcgcgatgagacgcgtgttctgcatagccagcgtcagacccgccagcgtaccggtcatctccaccatggcgtcgttcatgcccagcaccatgctgcccacgtacgacaggcgctcctcgtccagcatcgccagcagcgcctgctcgtgcgattcctcgtcggcgcggatgcccagcgcctcgggcgcttctttcgccagctcctcgtacgagatctgggccttctcctcgccccgctccatcagcttgacggcgaacgtgaagccgaacacgcgcgcgataagggagaatcgcagcaccttgccgcgctggggcttcatcgcctcgccagtgtagcgctgccagatggcggcgtgcttcgcctcctcgtcggcgatgcgcagcaacgcggcgcggttgctctcgtccttggtgccggccgcgatgcgccggtacacttcggattcggtcacctcgttctgctggaagatgcgaacctgtgcgagcgcttcgggggagagctgcgcggtcggggcgggtgcggtatcgatcatgatgctcctcgctgtttctttttcggttcggctgccagcatatccgattttgctatgtcgtggctgctgttttccggttgcgccgcatctttctcgctccgtgtccgatcccgtgcatccgatggtgccgccggtggcgaaaaaggctcgaattcggaagtttcggagcgtgccgcaggcgctgcgaaaaacgctctttctcgtaatacctggtcatcgaagtgcccttcatggatacaggcatgccgtgccctcctgaggggcgcgatggtttccgaattcggcatctttttgccatttcgagcccggggcgttgcacgctctcaggtctggggcgttgcacgcttcacccagagcagccacccgaaggcggccgccatcagcacgaggcctgcggcgtcgaacaggatgaagcgctcgatgctggcggaaagcgcggcgtggccggcgggcagcccgaagcgcagccacgattcgccggcaaggccgatggcctgctgcaccagcacgatgacggccacggcgcggaagcgcagcgggctggcgatgacggcggggtaggtggcgttccacatgaggaacgcgatgccgaggccctgcacggccgcggcgcccggcacgcccgccacctcgaacgacggtgcgtaggcatcgggccaaagcacgaacgacgccgcgcactgcacgttgatggcaaacaccagcagaaacgctgcgcgcgccagccacgcggcgcggcgtacgcgcacgggcaggtcgttcgtgtcggcgggttggttcataccgatatcctttcgcattgtcgtgcagcataccacgcccctcgcgcggcggtatactgctgttgagcaaccgaagaaaggatctccatgactgcctccgaacccacgccgcccatcgcatccccgtctcctgccgcgcccctcgcaagccagcttgcggccaacccctgcagccatccgtcgttcgaccagttcgtcgccaccatcgccgcgctgcgcgcgccggacggatgcccgtgggatcgcacgcagacgcaccagagcatcgcgcacaacatgatcgaagaggcatacgaggcggtggacgccatcgaagccgccgatgtcgcgcacctgcgcgaggagctgggcgacgtgctgctgcaggtggtgttgcaaagccagatagcttccgatgccggcgagttcgacatcaacgacgtgtgcgccgacgtgaacgagaagatggtccgccgccatcctcacgtgttcggcgaggcgcaagccgccaacgccggggacgtgctggatctgtgggaacgggtgaagatggcggagaagggcgccgccgacgaggcggccgacggtgcgggcgagcggcgcgaaggcctgctggacggcgtgcccaccagcttccccgcgctcatgcaggcgcagaagatatctcgcaaggccgcggccgccgggttcgagtgggactcgcttgacggcgtgtgggagaaagtgcgcgaggaaatcgccgagctgcaagaagcctacgccgtcgcgcccaaggcggcgaacggcaaggtggacgccgcggccgcttccgcaggcgccgccgtcgaccccgccgcggccgaggcggccgtcgccgccgtcgaggacgagctcggcgacgtgctgttctcgctggtgaacgtgggccgccgcatgggcgtggacgcagaaggtgcgctgcgctccacctgccgcaagttccgcgaccgatgggcctggatggagcaagccgcctggcagcagggtcgaaccatcgaagacctctccagcgaagagcgcgaaaccctgtggaacgaggcgaagaagcgcgagcgatcgtagggtcgcctcctgtcgtcctgggcgcccgcaccgcttcgttcgggtctccgcttcaaccctttggcacatttgatggcgcaggtgggcgtaaagcgctaaactgtatccccatcgtcatacatcctaccaagaaggcgaggagggcgatgcgtcctgcatgggaatttggaatcgaaaaagactcgctggaggaagaaaaaaccgacggggggggggctcattcgggccttctgagcacgacgccctgtcgggtcttctaaaccgcagcggattcaacgtgcgcgtgcgcgcattgatcgacgcccatcccgatgaggcgtatgttcttgtgtacggcgacatcgatcgcttcaaggcgtataacgatctgttcggcacttcggcgggcgatagcctgctcgctgatatcggcgagatgatccgccgcaatctgccgagcaatgcggcggcggctcggttgcgcgccgatcatttcatcggctgcttcccgcgttctctgttcgacgccgatcgcatgctcgccgtgttcaacgactggttcgctgcctatcgtcaggacttcaccttcttcgttcgcataggggtgtattccatcgacgatcccgagctggacgtcaacctcatgtgcgaccgtgcgctcttggcgctgcgcgccgcgaagagcggttctgcgggcagccgctatgtgctgtacgacgagacgctgcgcgcgtcgctgctgaaggaacagcagatggcgggcgagatgactaccgcgctcgaccaggggcagttcgtgccgttcttccagcctcagtactgctatgcgaccggccgtatgatcggtgccgaagtgctcgcgcgctggaagcatcccaagcgtggtctgctgggtcccgccgagttcattcccgtgttcgagcgcaacggcctcatctcccgcttcgattactatatgtgggatcaggcgtgccgctgcctgcgcgcgtggatcgacgcgcacggtcgcgacgccgtgccgcatctgtcggtgaacctgtcgcgcgccgacatctatcgatccgacctgtgctcgtatctcaaggggctcgtggagcgctacgatgtgccgcccagcctgctgaacctcgagatcaccgaaagcgcgtacatggaatcgcctgaccagctggttggagccgtcatggaactgcgccgcgccggcttcaccgtggagatggacgacttcggcagcggatactcgtcgctgaacacgctgaaagacgtgcctgtggacgtgttgaagctggacatgggcttcctcgatgcgcacgagagctcgcgcggcggcctcatcctcgcctccatcgtgcgcatggcgcgctggctgaacctgcccgtcatcgccgagggagtggaaacccagaagcaggcagcatacctggccagcatagggtgcgagtacatgcagggctatctgttctcgcgtccggtagatcgcgagacgttcgagcgcatgttgatggacggcggtcgagagtccgtcaagcggccgatcattgagaatctgcaggatgatgcatccgagttttggaacgcggattccccggtaacccattttttcaacagctacgtgggcgccgccgccatcgccgaatacgacaaccgaacgttggagatcgcgcgtgcgaaccatcagttcgctgagctgttcggcatgctcgatgatttggacgcggcggagaggatacgcaaggacctgctgacgcagctgttggacgaggatcgtgccgcgctgcatgaggctattttgcgcgcggtgcgcgatcgcggcgactccgagagcgagctgcgtttccgcagcggcggacgagggcgttggatccgtgtccgcatccgtctgctctcgcgcgcgggcaatctcagcaacctctatttgcttgccgaggaaaccactcaggagcaggctttgcgcgatcggctggctgccacgcgcgacaccattccgggcggtctggcgttctacgaggtggcggatcgcattcgtctgttggatttcagcgatgccgctgccgatatgatcggctacactcgcgaggaataccaggcccgcacgttggacgacgcgcttgcggtggtgcatccggaagatcgcgcacgcgtcgaagcggtggctgccgaactggatgcgggtgcgtcgcggtcgtcgtgcactatgcgcgttctgcgcggcgacggcaaggtggcgtggctgcatctttcagcgtcgacgatgtatcgagacgagacggcgctgtacgtggtggccgtgctcatcgacgtgacgaacgagaaggagaatgagcaacgcctcaaggcgcaaagcgagctgcagtgccggttgagcgattccgttccgtgcggcatcgtgcgctatacggtggacgacgagccccgcgtgctattcgtcaaccgtacgggatgcgagatattcgggtacgccgatttcgctgcatatcgtgctgggacggcgggcggtaagatcgtacccatccacgatgacgacgatgagctgcatgccaagacggttgcggcgctcaaggccggggcggcgcccatcggcttcacgtatcgtttcgtgcgaagcgacggctcgatgggatggatcgagggcacgtcggcgctggagcgcgatatcgacggcaggaccgtcgtccaaagcgcgttcctggatgtgtccgaccgccagcagaagcgctacgaacaggatatacaccgttattcgatggtgttgtgctcggtgtacgacgagatcgtcgagttcgatggcgagaacaagacgtaccgctcgctgtactcgtcgggcaggacgctcgccgacagaaccatgcccatggaagaggcgctcaagttctggaccgaccatctgcccgagccggacgatcgcttgcgcctacgtgccgcgatagacgaatgccttgcagacgacggcgccagccctatcgcctgcacctaccgaatggcgttcgaagataggagctgctggtaccagagcattctgctgcgagtgtcggagtcggccgtgctgtgctgcagcaaggacgtgacggaacacgtgtcgaacgaggatcgcaggatcatgatgcgcgtgctggacaccatgggcaagctgccggtgggcgtgggcgtgttcgcgaagcgcgatggcgaggtgcggctgcgctatgccaacgaccgactgagcaccatgttcggcgacgggcttccgggtgcgcccgataatcccgattgggatgcgccgcttgagctgagcgaagaggtgaagcggctcgatcagcgttgcgtcgaccaggaatcatcgcggatgggaacgaattggacgtaggtcttcgtgcggtgcgcgataacggagaggcgattgacgtgcggatccagggtcgcgtagcgcgcgagcctgacggcgagctggttctgtacgcagtggtcagcgacgtgacggcggagctgcgcgatcagcgtgaacgctcttggcagaatgagcgctatcgcctgctcagcgagatgacgcacaagatgagcttcgactacgattcggattccgacacggtgcttttgtacatggatcgcacgggcaagggcatggaagcccaggttatccctcattatttggaaacgctttcggaaactcgcggcaaaatcatccatcctggcagcatggacgacgtgcgcaggatgttccagcatgcacggtcgggcgccaacgaggtgagcgccgagtatcaggcagactacttcggcaagggctatgcctggtaccgcgccaatctgttcgttgcccacgacgtcgcgggcgtgtggcatctcgtagggttgatagagaatatcgatgacgagcacgatctgcggttccgtgcggaaaacgacgcgacgacggggttgagcaaccataccgccacgcaggatctggttgcctcggcgctcgccgacgcatcggtgcggcggcacagcgtgtgcgtcgcgctcgatatcgacgacttcaagtaggtgaacgacacgtacggtcacattgagggcgatacgttgctgcatgaggtgggcaaggtgctgagatcgagcttccgcgaaagcgacgtgctgggtcgcgtgggcggcgacgagttcctgctgctgctgaaaaacatcgatctcgaagtggcactggacaagctggaacaggtcaagcgccagcttgcagccgtgaaggtcggctcgcagggaaaagccctgtcggtcagcatgggcgtgtatgtgccggaagacgatgacctggcgtaccgcgacgtgttcgtgaaggccgacgaggcgctgtatcgggcgaagcgttcggggaagaaccgcatctgcgtccacggccgctagggtcttttgcgacttccgtcattccgatcgcaagcgccaatcgctgatccccttgccatcctgagcgcaggcggcggagccgccggagccgaaggatccggcgcgccgtcagccttctccgcctggcgcatctgatgattgcgcgggattcggcggccggaacgccgttgacgtgacggctcggctatcatgggatcgatagagccgtgcttgaaggagtattcgttatggcagacgcatcgcagcagccgtccgatcgtcgacttgcagtcgaggcgcagagaggcgagggggccagccgctttccctttttgttgaccgacgacctgcgcagccccctggacgatctgcagcgtcttcgtgacgccgaggtgaaaacccgcgagatcatccagaagtaccaagctgccatgcgtgagatgatggtgcgcttcgagatcctcgaccaggatctcaatctcaagaagcaccgcaaccccatccatcatctggagtcgcgcataaagaaacctgccagcatcttcgagaagctggagcgctacggcaaagagcccacgctggagaacctcgagcgctacatcatggacgtggccggcgtgcgcgtgatctgctcgtacatccacgacgtgtacaacctgctggagctgctgcaaaaacaggatgacctggagatcgtcgagatcaaagactacatcaacaatccgaagccgaacggctatcgtagcctgcacgttatcgtacgcattcccgtgtactttcttgacaagaaggaactcattcccgtcgaggtgcagctgcgcaccatcgccatggacttctgggccagcttggaacacgatctgaagtacaagtcggtgagcgaggtgcaggggatcgactcctacgacgagctcaaggattgcagtcgcatcatcgaagacgtggagtcgcgcatgcagatcctcgctcgtgcgttggagatggaagattagcggccggagccagctgcatgggctgatggcccgcacccgcgcgccttctgcgcggttccgtcagcatcttccgaaagaggcaagccgacttttcggcctgcctctttcttgctctagttctcgaaatactccgagaagcgggcggtctgcttgttctcgcgaatgacggcggcgctcttcggctcttcgatgcgcatgaagaagaagtgcaggtaatggatgaacacgtatcccaccatgaccaccgacaccgccgcctcggccgcgaacaggacgttcagcacttcgggtaccgcaaggccgttagcctggaagaacgcgagcgccttgccgagcgccgtggccgtgatgacgaaggggaacgtcatggccgcgtagctggggtagaaccgaaggcgcagcagaacggggaggcgcgacagcaccacggcgaacagcacttgcgccaacaccagcatcgccaggacgaacacgaggttcggctggggagccgtggccaagtagcctacaagggacaggctcatgggagcggtgtagatgcagaacagcgggcgtgcgctttcggggatctcgtgcttcatgtagcggtacgtcaccaagcccaaaagcacgacgtagcaggcgaatccgaaccagaacagcagatggcccactgcctccatgccgaacgtcggagaggtgacggacgctacgacgatgcccacgtagcagatgaagtaggttggaaacacctcatgcagtttgaagtgcgagatgaagcgagcggtgaaccagcccatcagcgcgaggtgcgccacaacggccgccgaccatagcgcaaatgccggaatgtacgcgaagggggccaggtagccggccagctgcatgagcgtcatgaagagggtggcgctgacgctggccatgatggagttatgcaggtcgtcgcgaatcatatcggggaacagcgcgatcttggcgccgagcatggcgatgagcaccagcgacaggatgccgcagacgatgtgaacgatctcggtgtagggctgaagcaagttgcccagcgcggctaaaccgagcgcaacgcctgcggtgggtatggggacttttctgatgatctcgcgcacggcgctacctttctactgtcgcgcatcttactccttgatgcgcacgatggaggggccccgctcgatgttccatctgaaacacgcacgggggtctgtctgcggcttgcaagcctgcgacctgggaaggctcgggacttgcgagtcgctgcccattcttccattcccctacgaaaaagaaaacttctaaatacttatgttatgattactatatcttatggttattgtttgtcctgatagaggtcgcaatgctggatttccgtgtcgaaacgtttctgaccgtttgccgaacgatgaactacacgcgcgccgctgaggagctgaacatcacgcagccggcggtgtcgcagcacatcgcgcaccttgagcgcgattacggcgtgccgttgttcgcctaccgcaacaagaagctgcagctcaccgacgcgggcgcgctgctgcgcgacgcgctgtccacgatggcgcacgacgagcgcctgctgcgcgaccggatgcgcagctcggccacgggcgcgcgcgtggagctgtcgctgggcatgacgctgacggcaggggagtacctggtggctgcgccgctggccgactacctcaggcgacatcctgaactgcatgtcgccgtgcgctcgggcggcacgagcgagttgctggcgttgttgaacgcaggcgaaatagactgcgcgttcgtggagggctttttcgacaagaatgcgtatgcgtgggacgtgttccgcaccgaacggctggtgtgcgtgtgcgcggccgatcatgagttcgccgctcggcccgtgcgcgtggaagatctgttcgacgagcggctcatcgtgcgcgaaccggggtcgggcacgcgcgcggtgctcgaacacgcgctggcggctcagaaccttacggtggacggcttcgcgcaggccagcgtggtggagagccttgacgtcatcaagatcctcgtggagcacgatctgggaatttcgtttctgtacgaggcggctgtggcgcgcgagctggccgccggcacgctgcgagtcatcgatctggaggggctcgccatcctgcatgacatcgcattcatccgcctgaagaacagcgttttcgagcgagagttccagaacctgttcgccgatctctgatcgaaggcttcgacgaagcttgccggtccctccttcgcctgctgttcctgcgctccgcttctcgcgcccgtgctcgcgcccgtgcctcccccgcgttcgatcccgctcccgcgctcccgcacccgcttcctcgcgctcgcgcaccctgcgttcgacccggccacccgcacccgagctccccacgcccgcgtccaattactctggatccgcgtccgcgtccaattcctctgggttcgcgttttgcgctcgattccgcgggatctgcgttcgagcccgctgcccgggtctgcctcgccgttcagttctcctgcgtcgcccggctcgtgggggcggtgcgcatcccggtcagccgggatgtttcacgtgaaacatccgtacgcgttggagagggggcgcaggatggaacccgtgccggcgagcgccctgcgacggatcgtttccctgcacatggaagagaatgccccccctatgcacgattcttctccctcgccatttcttccgacctggtgtttccctcctcgcctccgtcggcaggccccgataatcgtgcatagcgcgcattctctgccgccccgcttcccggccttctgcgggcgatgccggcgcgagcccgttcgggccgaacgcggcggccggccccccccctcggctggcgccctccccgactggcgccccccgactggcgcggcctctccgacctcctcccggactggcgcgcgggttcccaatcctgatccttggccgccgtagtgtccctgcccggctcgtgggggcggtgcgcatcccggtcagccgggatgtttcacgtgaaacatccgttcgcatcctttctccaaaaaaccctcttgacttggagtccgctcgaagccctatgatgataggcgaacccatcgagaggagcatcgttgagaccggaattcgaaaccacgccgaagctgggcttcggctgcatgcgcctgccgctgaccgatcccgccgaccagcagagcatcgacttggagcagttcaagcagatggtggacgcgttcatcgaagtcggcggcacgtacttcgacaccgcgttcgtctaccacgagggcgcgtccgagaaggcgctgaaagaggcgctggtgaagcgctacccgcgcgacgcgtacacggtggccacgaagtgcctggcctgggccgcgcccagcgccgaagaggcgaaaagcaacctgaccacgtcgctggagcgcatggggctggactacgtggacttctacctgctgcacaacgtgggcggcgagcgcacggccaagttcgacgagtacggcatgtgggatttcgcgctggacgcgaaggagcgcggcctcatcaggaacgtcggcttctccatgcacgacggggccgacgcgctggacgcgctgctgacggcgcatccgcagatggacttcgtgcagctgcaggtgaactacctcgactgggacgacccggtggtggaggcgcgccgctgcatggaggtggccgcgaagcacggcgtgcccgtggtcgtcatggagcccgcgcgcggcggccgcctggtggagctgccccagcgcgtggccgacgtgctgcgcgcggcgaaccccgacgccagcctggcctcatgggcgtatcgcttctgctgcaaccagccgaacgtgctcaccgtgctctcgggcatgtcgaacctggaccaggtgcgccagaacgtggccgactaccaggcgaaccgcccgttctcgcccgaggagcagcaggcgctggacgcagccgtcgaaacgctgcgcggcatggccagcgtgccgtgcacgaactgccgctactgcgtgaaggactgcccgcagggcgtggtgatccccgccatcctgggcctgttgaacctggagcttatgaccgagaaccgcgatttcgcgaagggtctttactcgtggcaggccgcccctgggcctgcctcgtcctgcatcgcctgcggcgcctgcgaagcgatgtgccctcaaggcatcgacatcgtccatcagctggaagtggcggccgagcacttcgagggatagccgccgccccgctcgggcaaagcccgcagctcgaggtccgcaagcgcgaggcccgcgagccctggttcgcagcccgtgagcccagcccgaagccgtgcgccgcgagccgcaagccctagcccgcgagccccaacccgaagccgcaagccctagcccgtgagcctgcagcccggaccctgcgtgcctgggctccgcgaacctcgagctcgcagccctaacccaaaggcccgctctttcgcaagcgcgaacggatgtttcacgtgaaacatcccgagcgaggcggggcgaacgtggtcggtcgatgccgccgccctcctgcgtttcggttcgctcatcagctcgttcgcgtccgctttacctgaacctttctcgttcctgatgccccctttgctcaaacttgggggcatctttacgcgcgccttccttcgtccttaccttcctttcttacgatggttctcgcacgttggccgcagggtcaactcgtgccgaagacgaatgcgatcccggcgattgcgccggggatacgagaggaacgcaactatggcagaagggtttttgagcaggcgccagttcgtggccggcagcgcggcgctggcgatggcgggcatgttcggcgctttgacgggctgcacggccggcggctccggcgcggctgcgggcgcggacacggcttcggtctccgccggcggcgacgcagcctcttccaccgatcccatcaccatggtgtggctgcccgacaactcctcggccgacctcacctcctcgcgcgaggccatcggcgcggccatcacggcggcatgcggccgcgaggcgaatctgctgaccaccaccgactacaacgtggccatcgagtccatcgcgtcgggcaaggcgcagatggcgctgttgggccccgagggctacgtgcaggccaacaagaagaacccgaaggtgctggccgccttcacgaacagcgacgaggacggcggcctcgaaggcgcctgctactacagccgcatctgcgtgcgcaaagaggacgccgaccagtacaagagcggcagcggctactccatcgagaacatcaagggcaagtcgttctcgttcgtgtccgccacctccacctcgggcttcaaggtgccgtcgagcggcatcgtcagcgagttcggcctcgacagctccgacgagctgctggaaggcggcaagttcttcagcgaagtgctgttcggcaactcgcatgtgggatcgttggtgaatctgctgtccggcgatgccgatgcggccgcgttcgacgatgtggacgtggatatgtacctcgacctcgtgtccggcgaggccaacagcatcggcgcggtgtacaaggccaaggacgacgccgaggctcccgtggactcggtgcgcggcaaggaattcaccatcatcgccatcacgccggtgctgaactcgcccatctgtttcaacgaggaagccatctccgacgacgaccgcacgaagatcatcgactacttctgctccgataaggtagccaacgacaaggccatcttcatcgatcccgaggacgagagcgccaagggcctgttcgagaaggattccgagaagacctgcttcgtgaagaccgacgatgcctggtacgagcccatccgcaaactgggcgggactgcgtaatgagcgaggtgctgggaacaccttcggtcgagcggcagggcttcgagccgctgctcctccttgagggcgtaacgaaaagctacgacgggtggtcgaaggcgcttgacgacgtgtcgctttccgtggcgcgcggcgaattcgtcagcatcatcggctgctcgggcgcgggcaaatccacgttgttgcgctgcgtgaaccgcctgatcgaccccacgcagggcagcgtcgtcttcgacggcgacgacgtgacgcacgtgcgcggacgggcgctgcgccagacgcgtcgccgcatcgccatggtgttccagcactacaacctggtgtaccgtgccaccgccatcgagaacgtgctgcaggggcgcttgggctacaagtccgccgtcgccggcatgctgggtctgttcagcgaggacgagaagcgccgtgcgttcgagattctcgaccaggtgggtctggccgacttcgcgtacgcgcgcaccgaccagctgtccggcggacagaagcagcgcgtaggcatcgcccgggcgctcgtgcaggacccgctgctcatgctggccgacgagcccatcgccagcctcgacccgaagtcgtcgcgcacggtgatggagcacctgcgttgggcggccgacgagctgggcgtggcgtgcctggctaacttgcaccaagttgacttcgccatggaattctccgatcgtatcgtggcgctgaagaagggccgcgtcgtgttcgacggcgcgccgcacctgttggacgaggccgccatcgccgacatatacggcacgaacgaggaagccgaagccggaagcgacttcggcgaacgaagcgttcggcaggtcggcgagctatcgggctctcgaacgcgcgaggcggatccagaaaggctcggaaaagcggaggcgaaggattcctcctcgccggaggtggcggcatgaccgagcgtgttctgcagtcggccggcttcctttcgcgtctgcgcggcaggcgcgcggcgccgcgcggcgcctacgacccgtcgttctttctgcggcgcacggcggccgtcgtcggcatggcgctcgtgttcgtggcgctgggcgcgctgtcgggcacctatgtcggcttcgatttcatgcaggcaatcctcgacgtcccgggcgggctcgtttggatggcgacgcaattcgtcccttcccttacctccctccagaagctggacaccatccttcccgccttgggttcgacgattctcgcctcgatcgcctccagttgcacggcggcggttctggcgtatatctgcgcggtgctgggctcgcgatcggtgggggtgggtgggccgtttcccctcatcgtgcgggccgtcgcgtcgctgttccgcaacatcccggtggtggcctgggcgttcatcctgctgttctcgttcaagcagagcgagttcaccgggttcttcgcgctgttcctcacaagcttcggttacctgacgcgctgttttctggagagcatcgacgagatgagcgcgggtcccgtggaggctctgcgcgcctccggggcgacctacggccagatcgtggctcaggcggtcgtccccatgagcatcacgtcggtgatcagctgggtcatgtacatgatcgagacgaacatccgcgacgccacgctcatcggcctgctcacgggcacgggcatcggatttgtgttcgacgtgtattacaaaagcttccgctacgacatcgccgggctggtcatcctatccatcgtcctcgtggtcatcgcctgcgagctgacctcgaacttcgtgaggaggaaggtcatatgatggcgaatgccgacaaagtggctgccgaagcgaacgcggcggccatcgccgaggacgtcggcatcgtgcagggcgcctcggccgacgcgctcggaataggcgccggtgctgcggaaaccctcgatggcgatacgaacgacctgtgtggcatgggcgcgcgcacgtcgcgctcggggaagatcaaggtgcatgtggccagcaagtcgaccgtggcgctgtacgttgtgctgggcgtgctggcagccatcaccgtgttcgcgcttgtggtgatggactacggcaaagtgtcgtttcccgcagcgatggccgcggccgtggaagacttcgtcaccatgatgacgcagccggggctgggcgggcacttcacgctgcccgacgtgatcgaaggtctgttcgtgtcgctggcgctggcgcttctgaccacattcatcggcgcggtgatcgcgttcgtgctggggctgctggcggcctgcaacctgtccagcaagggcatgagcaacgccatcaaggtgttcatgagcgtggcgcgcgccgtgcccaccattttgtgggtgctcgtgttctcggtggccatcggcctggggccggaggcggctgtcacaggccttttgttccacagcgtggcgtacctggtgaaggcgtactcggaaagcttcgaggaagtggacgccggcgtgctggaagcgctgcgcgccagcggtgcgtcgtggtggcaggtagtgttccagggcgtggtgcccgaaaaggtgaacgagatgctgtcgtggacgttcatccgcttcgagatcaacttcgtcaacgccgtggccgtgggcgccgtggcgggcgcgggcggcatcggctaccagctgttcctggccggcagcttctactacaacatccacgaggtggggctgatcgtgtacttgtgcctggcggtggccgtggtgctggaagtggcggccacgcagctgcgcaagcgctacatcgtgcagcactgatttgtcttgcgagcgggagggcttgggggctgcggggcccggggcgatgcccagtcgctcaaacagtcctcgcttcgctgcgaaactcgcttggtgggcaccaccccgggccccgcagcccccaagcctcttgcatgttgaaacaatcgttctgcgcggggcgcttgcgcggattcgcggccggtgtatgaagagagaaaaactcagatgggagtggtgttttgttgaaacggtatgagcgtactcgtgctttggtggagggcgatccggcgttggctcgggccatcgtgtgcgaggtggagcgcgacggggcgcaagatgccgtcgcggtgctcgacgagccgcgcgaggaactggtgatggtgcaggcgcgcgagacggcgcagggaagcctgttcttcctgggcgaggcgctgatgacgtcgtgccgcgtgcgcgtgggcgacgccgtgggcttgggcctcgtgctgggcagcgatcggtgccgcgcttacgagcttgccgtggtggacgcggtgttctccggcgcggcgggcgacgcgtgggcttcccgttgggacgcttccctgcgcgccgagctagcgcgcgtcgaagcgcgcgaccagcgcgagacgcgccgcaccgcggcgacgaaggttgatttctcgactatgaaggtggaagcatgacgatacgagaagacgctgacctgcatcgcgcccagcgggcgttccgctgcgtgctcgatgcgttcgcgcatccgggaaccgtgcaccagttggtgccggcgcccgagaacccggcgagccccgttgcgctcgacgcgtcgttggagctggtggtgcgcctgttcgtggaccaggcggtgacgttctgcgtggccgattccgagtccgacgccgtggctgcgtaccttacgagcgagacgcacgcgcgtcgggtgtccctgcgcgatgccgacttcgtggtggtgcccgcgcgcgccgacgcgcagacggtgtacgaggcggtggcggaggcatgccgcggcacgctggtgtcgcccgagaagggggcgaccgtgctcgtgggttgcgcccgtttggccgacgcgcccgaaagcggcgaggtttcccagccggccgtgcacgtggtggcgctgcagggcccgggcgtggaacgcgagaaccgcttcgccgtcgatcgcgtggactggctgcgcgcccgcgacgcgcgcggcgacgagttcccttgcggcatcgagatcgtgctggtagacccggagggtcgcatagcggccgttccgcgcagctcgagcgcgcgacgcctcgccgaccccgcaaccgggttcggcgccgaccccgcgtctgacctcgcgcgcgacgctgcaaccaacccagcgcccggcctcgatccctcaaccgatcccgcgtcgatgtttcacgtgaaacaatcgactcaatgtagtgcgacaaaagaacaaatgtttcacgtgaaacattccgagtccgtgcctgctgaggggttcgcgcccgccgcaaccgccgtatccgctgcgaagggggtgcgctagatgggatacgttgccgtgcgcggtggcggaaaagccatcgaggaaagcctcaagctgctggaataccagcgcgttagcgcgtcgtccgcctggggcaccgacgagatcgagggcacgtttcccgaactggtcgaccaggtaatgggcgaggcctcgctctacgcgccgcgtctggccgcgctggcgctcaagcaggcgcagggctcgcccgacgaggccgtgttcctgctgcgcgcgtttcgctccacgttggagcgcccctacgtgtcgcgtccggtggacacgggcgccatgcgcgtgaaccgccgcgtgtcggccgcgttcaaggacgtgcccggcggccaggtgctgggcgccacgcgcgactacagccaccgcctgctggcgttcgacctggaaaccgagggcgccgaagagctggccgagaagcgcgccgaactggccgctcacttcgagagtgccgccgaggccctcgaggccgcgcccgacgttgcgcccgccgcttccccgtgcgcggagatccccgtagggacgggctgctgcccgcctgcgtgcgcccagcagggcgcccctacgaagcctcccgacaccgccgtgcccggcgcgccccaaattcccgccacccttccgcgcgtgctggactatctgcgcgcccaaggcctgctcgcgcgcgtcgaagccgacgacgcgccgccggtggacgccaccatggcgccgctgtcgttcccggcgccgcgctcggtgcgcttgcagacgctcgcgcgcggcatgacgcaggccgtcgaggcgctggggtacgccgccatccgcggcttcggccccgcgcatcccacggtgggcgagctccgctccggccgcgtggccgtggccgtcgaccatccgcttgaggcgggcgacgagcaagatgcctactacctgggctccgtcccggtgaccgaggtggaaagcgtgttcgagagcgagggcgaaagcgatgccggcgacggcgcggcgacggccacgcgctccgatggcggcttgtcgctggccatcggctacggcctggtgttcggccgtgccgagacgaaggccatcgccatgagcgtgctcgaccactgcctggagcacggcgacaaacggttccccaccgaggacgaggagttcgtgctgtaccacgtggacggcgtggaggccaccggcttcatctcgcacctcaagctgccccactacgtcacgttccagtcgaagctgtccagcgtgcgcggcacgcgcgacgatcgcggcgaatgcgacccgcgcgtcacgctcgccgtgcgcgacccgcaaagcccgcgcaaaccgcacgaccaacccgccgagtcgaaggaggcccgcgatgcagcagcgctataactacgcgttcttcgacgaggcgtcgaagcgcgagatccgccgcgccctgatcaagggcgtgtccatccccggctaccaggtgcctttcgcctcgcgcgagatgcccatcgggcgcggttggggcacgggcggcctgcagatcacgctggccatcatcggttccaacgacacgctcaaggtgatcgaccagggttccgacgacagcgtgaacgccgtcaatatcaagaagctggtcgtcgacaccaccgacgtggaggtgaccgacgccaccgaggacgccacgctcatccagtcgcgccaccgcattcccgagcatccgctggacgacggtcagatcctcgtgctgcaggtgcccacgcccgagccgctgcgcagcttcgagcccagcgaggccgccacgaagcgcctccacgccgaagccgactacaccggcgcgtggctggaactgttcgaccagatcgtgcgcttcgatgccaccaccaccggcgccgaccatcctgtgcaggtgttcggccgctacgtgatggcgccgtcgcccatcccgcgcttcgacaacctgaagctgaaccaggcgcgccacctcacgctgttgggggcgggccgcgagaagaagatctacgccgtgccgcccttcaccgatgtcaagccgctcgatttcgaggactacccgttcgcggtggaaaccttcgagggaaagcgctgccgcctgtgcggcgccgagggcgtctacctggacgagctggtggacgaagccaccggcgaaacctactaccaatgcaacgatacggcctggtgtacgcagcggcgcgaaacgaccggcgattctcagaaaggaacttcccatgcttgatgcgcaacggttcggcgtcgacgaggagccgtgcttgtcggtgcgccacctgtcgaagcgtttcggcgcgggctgcccgcactgccttgctcccgcggcgcagctggaacgcaacgtatgcccgcgttgcggcacggtgctcgccgtgcgcgacgtcagcctggacgtgttcccggccgagatcgtcggcatcgtgggcgagtcgggaagcggtaagtcgtcgctgatgaagtgcctgttcttcgacgaagaggccaccgagggcgacgtgcgcgcccgtcccttcgacggcggcgcggcgaacctgctgcagctgtcgccccagcatcagcgcgccatccgcaacacggtgttcggcatggtgtaccagaacccctacctggggctgcgcatggatttctccagcctgtcgaacatcgccgagcagatgatcgccgccggcaaccgcaacgtgggcgccatgcgcgctcgcggggaggagctgctcgcgcgcgtgaacatcccgctgtcgcgcgaggccgagccgccgcgcaacttctccggcggcatgcagcagcgcgtccagatagccaaggcgctgtcgaacaatccgcccatcctgctgctcgacgaggtgaccacgggcctcgacctctccgtgcaggcggccgtgctcgacctcatccagcagatcaggcgcgatttcaacgtcagcatgctggtggtcagccacgacctgggcgtcatccgcatgctggccgaccgcacgctggtcatgctggacggccgcgtcatcgaaagcggcctgaccgaccagatcctggaagacccccaacacgcatacacccaacagctcgtctactccttgctctgacgagcaaggagtacgccgacgctgcgggctcttccggtgtccgatcttggcgctccaagccctcgtcgcgtaccaaagtacgcttcctcggtctttcacgccaatctcgggcaccggaagaaccctcgctgacttactacgccaacatgtgaccctttgaaaggaacctgcaccatggacaccaattcttgcatcatccgcggcggcacggtggtgtgcgccgaccgcgtgcttcccgactgcgacgtcgtggtcatcgacgggcgcatcgccgccatcgagccggtgggcgcgtccgacttcgacgcgcagcccgatgccacgatgggcgtgctgcccgtggtggacgcgcgcggtgcgtacgtggtgcccggcctcatcgacatccactcggactacgtggagaacgtggcctcgccgcgccccagcgtggtcatggacctgtccacgtcgctgtacaaggccgaccgcgagctggtgtcgcacggcgtgaccaccatcttccactcgctgtcggtgtacggcgcgcacgtgttcgaccacaagcccatccgcgatttcggcaacgtgagcgccctcatcgaccgcgtggccgccctgcgcgcgggcgaggagcgcgaccacctcatccgccaccgcctgcacatgcgcgtggagctggactcggtggacctgtacgacgacatcgagagcttcctgcgctcgggcaaggtggacctcgtgtcgttcatggaccacacgccggggcagggtcagtaccgcgacctgctggtgttcggcgacacgctgaagggctaccgcgatgtcagcgacgaggacgtgcgcgacatcgtgcgtcagcagcaggagagccagaagctcacgtacgcccagatcaccgcgctggccagcgtggcgcgcgagcgcggcgtgtccatcgcctcgcacgacgacgacagcgaggacaagctggcgttcatggacggcctcgaggccaccatctccgagttccccatctcgctggacattgcgcgcgcggcacgggcgcgcggcatgcacaccatcgcgggcgcgccgaacgtgatgctgggtcacagccactcgggcaacctcagcgcgcgcgaggccgtgcaggccggcgccatcgacgtgttgtgcagcgactactacccggcggcgctgctggatgcggtgttcacgcttcgcgaccagtgcgggctcgacatcgcgaaggcgttcgcgctggtcaccatcaacccggcgaaggccgcgggcatcgccgacgaggtgggctccatcgcggtgggcaagcgcgccgacgtgctgctggtgcgcgagatctcctgcggcgaaggcgaaggctcgggcgagcacccgggcgcaaggccggacggtcgcgtcgcgcgcacgatgcccgtggtcacgcgcgcgttcgtgggcggccgctcggtgttccgctcgcactatcccgaccagccgctcggctacgggcgcgacaccgagcagctcgtctcgctcgaccagctgacccgccctctggccaaggcggtgtagcatggcgctcctccgaatcgacggcctgtccaaaaccttcctgctccatcgcgtgaaccggcgcgtgcaagggtgccaggacatcgacttcgccatcgaaccgggccagttcgtgggcatcacggggcgcagcggcagcggcaagtccaccatcctgcgctgcatctggcgcacaaacctgcccgagcgcggccgcattctgtacgactcgcagcgcttcggcatgctggacctggcccaggccacgcagcgccagatgctgtacctgcgcgcctacgagctgggctacgtctcccagttcctcaacgccctgccgcgccaaaccgcctacgacatcgtgctgaaaagcgcgttggaagcgtacggcgccgacgagcgctcccgcgccgaagaggagaccgagcgcatgctgcgccacttcgatctggacgaaggcctgtgggagctgtacccccgcacgttctcgggcggcgagaagctgcgcctcaacatcgccgccgccatgatcaagcgcccgcgcctgctgctgctcgacgagcccacggcctcgctcgacaacgcgtcgaagctcaaggtgcgctccctcatcgagcagctgaaagccgaaggcaccacgatgctcggcatcttccacgacctcgaattcatggaaggcttgtgcgatcatgagttcaacatgcaggaggggatgatggcgtgacgaggatgtatcgcccgcgcccgacgccgtgcggtcgcgagcaggaaagggtggcgcgcaagagaacggatgtttcacgtgaaacatccggaggcggcgacggagccccttgcggcggcgaccttcgtggcgacggcgccttgcgcggtcgcgcaacgtcgtcccaatggcaaaaagcattcgaattcggaatctcgagctgtcttttcgcggcgcaggaaagcggaacgctggcaaaacgcctggtcgtggaaaaccatgccccgacttctcgcatagtccaaccctatgaggcgggcacgccttccgaattcgatgcttttttgccatcccagccgtattccgtaccgcgaaaggggaatcgtgatcgaagatcttcacgtgcattcgacgatgtccgatggatcggacacgttcgagcaggtgctcgaacaggcggcgcagcgaggcgtcgagcgcctggcgttcacgaaccacgacaccactgccgggctgaccgccgctcgcgagctgggcgagcgcctgggcgtgcaggtggtgggcggcatcgaggtgagcgcctacgacttcgagcgcggccgcaaggtgcacatcctggggctgggcgtcgaggagggcgcgcccgcgctggccgccctgtgcgggtccacgcttgagcgccgtcacgcgaactcgctgtggcagctggaccggttggtggaagcgggctacgaggtggacgtagagcgcgcgcttgagctgggccgcgcgtcaacgtgcctgtacaagcagcacctcatggccgcgctcaccagcgagccgtaccccagcgccgcctaccgcacgctgtatcgcagcctgttcaagaacggcggcatctgcgaccgcgacatcgactacgtggacgcgcgcgacgccgtgcgggtcgtcgtggaggacggcgggctggcggtgctcgcgcatcccggccagcttgacagctacgatctgcttcccgacctggtggaatgcggtctcggcggcatcgagcgcttccatcccgaccacaccttggcagatcacgctcgctgcgccgagcttgccgttcgctaccgtctcgtctgcacgggcggttccgattaccacgggaagttcggcagggttccccacgtggggtttcgcgttccggcgtagattgcgcgaaccttccggagcgctagggcgcgtgccgttgcgtgcgcaggcccgccgaatcggcctgggaggccgcgttgcgcaccgaccgctccgtccccgcgatcgcccgctccgcatcgacgcggccgtgccctgcgccccgcgatcgcgacctcgtacgggcgggggttcgcgcgctttggcggttgtacgccgtccgtcgacgcgctacactggtcgccatgacgcgcgacccctcatcgacttctccgaacgcccctgatccgaggggcgttttttcgcgcgcccgcatcgcttcggcctgcctgcgcttcgcgcggacccacgcggtgctgctcgtgtcggcgctcgccgcggcggccaccatgctggtcgtgccgcccgacgcctcctatctgggttacttcgatcttaaaacgctcgcttgcctgttcggcatcctcgcgctcgtcggtgcgctgcgcaacgcaggcgtgttcgaagcaacggctcgcgcgatggtggggcgcttctccacctgccgcgcggccgtcacggccatcgtgggcatcacgctggtgctgtcgatggtcgccacgaacgacatggctctcatcatgatgctgcccctctgtgcggcgactttgctcaaagcggggtgggaacgcgcgcttcccttcgcgttcatcatgcagagcctggcggcgaatctcggcggcatgatcgtgccgttcggaaacccgcagaacctctacctgttcgagcggttcgacatcccgctgacggacttccttgctaccatggcgttgccctttgccgtgtcggtgctgctcatcggcctgagctgcgccctgttcgcgaagccgacgccccgcgcttccgaagggcggcctgcggaggggcggcacctcgcgcgatccgacgtcgcccctgtcgaccgtcgtcgcgccatcgcgttcggcgcgctgcttctgctggtcatcgcctcggtgtttcgcctggttccgtatccggtttcgctcgtcgccgtggtagccggcttgctcgtgctcgaccgtcgcgccctgcgctcggtggacttcgggctgctgctcaccttcgtctgcttcttcgtgttcgcgggcaatatggcgcgcattccctcggtcgaagcggtgttgtcccgggcgatggccgataacgcgctgctggccagcgcggccgccagccagatcgtcagcaacgtgccggccgcggtgttgctgtcgcatttcaccgacagctatcaggcgctgctcgtgggcgtgaacatcggcggcgcgggcacgctggtggcatcgctggccagcctcatcacgttcaaccagtatcgtgccgtgcgtgctgcgctcgggcgccgtcccgaattggcgcgccaaacggcgagcggcttcgtcgcgcgcttcacggctttcaacttcgcgtttctcgcggtgctgtgtgctgtgtgcgccatatgcggatagccgctccatcgctctagcgcgctaaaccgcacggccctccgaaacgaccgctcgggggccatcacgctcaactaacccttctcttggcgcttagacctttgataaagagcgtccggggccgtatagtagtgcgactgcgtcatacttatagtgttcgagaaaagcggatgcagtggaaaggggaggaacatgaatatcaagaaatggggcgcgctcgtcgccgcaggcgcgttggccgcgtcgctcgcgctgtttggctgctcgtccggagatcagggaaccactaccagcagcaccagcgggaacgatgcgggctacacgttggtcaacgacggcaagctgacggtggcggcgtcgctcgacttcccgccgttcgagaatctcaacggcgacaagcccgaaggcttcgcggtggacctcatgaccttgctggcggaagagatgggtctcgagtgcgagtatctgccgtccaccaagttcgacaccatcgtgccgctcatccagaccggcggcaaggctgacgtcggcgtgtcttcgttcaccatcaccgacaagcgcctgcagcaggtggatttcaccgatccgtactgcaacgtgaaccagagcatcaccgtgcgcagcgattcgggcatcaccgacgtcgcccagcttgagggcaagaagatcggagcccaaagcggcacgaccggctacgagtgggctgccgagaacatcaaagatgccgaggttaccggttacgacgagatgacggctgtgttcgccgcgctcgactccggccagatcgatgccgtgtccgtggacttgccggtggcgaactactacgtgaggtcgtactcggactgccaggtgatcaaggagattcccacgggcgagcagtatgccgtcgcagtgagcaaggagaaccccgagctcacgaaggcgctgaacaaagcgctgcaggccgtgcatgacaacggcaagtacgacgaacttgccgccaagtggcttcagtaaattaaccagcgtgacatcatgagtatcattcgatgcacgcggatgcacctggcaagtgccgcagcgcttttggccgctgcggcacttgccgtgctgttcgcgtttccgctgagcgctcaggcgatggaggttgagcgatggaccgcccagcccaacgacgacgcgctcgaaaaggtcatgggcgccacgcccacgcgcgtcacgtggcaagggcagaccgccgaggacgaatcgctgtcggcgttggctatcgatctgcccgagggctcgtccgtcgacgccgagaacgtcaaggttaccgtcatgaacggcctcgatcgcctcgacgtcgcctcgaaggtgcaggttgacggcggatcgctggtcacggtgacgttccccgaggccacgcctgccggctctcttgtcatggtggagtgcaaccgcacgcttttgccgggcgatgggggaaccttcggcctgacgggaagctataccacggcggacgggcagacgctcgacatgcctgccaccgacaagacgttcgacgtggtcagcacgtctccggccgagcaattgtccacttggctcggcatgcaggattgggtgaaggcgtggaactccaacaagttcctccacctgttcttcgaccccagcatcatcgtcacctcggtgccggtggtgttcagcggatggcttatcgccatcgcgctcgtcatcgtcagctttccgctggccattcccatcggccttctgtggtcgttcatgcgcatggcgaaaagccgtgtcccgcgcgctctcggcgctacgtacatcaacatcgtgcgcggtacgccgctgtttctgcagatatacatcgcgtttttcggtttgccgctgctcggcattaaaatggatctgttcgtgttgggcgcaatcgtcctcgtgctgaactccagcgcgtacctggcggagatattccgcgcgggcattcagtccatcaacggcggccagttcgaagctgcgcgctccttgggcatgaatggcgcgcagacgatgttctacgttatcatcccgcagaccgtgcggcgcgtgatccccacgatgacgagtgagttcatcctcatgtacaaggacacgtcgctgttggccgccgtaggcgtcatggagatcatgatgtacgcgaaaaccatcacggccgctacgggcaacgtgacgccgtacatcgtggccgccggcttctaccttatcgtgaccattcccatgacgaagctcatcaactcgatggagcagcgcatggcgggcggccgcaagaagcgtaagaagggcgtgaccatcacgtcggaagaggccgtgctgcccgactccgatgcggccgtgtccaagagcctgcgcatgtccgagacgctggccggctccaaccatatcagccattaaggaggtgcggatatgagcgaagaaagcacaaatgcagctgacgtgcgcgtcggcgagccggtggtccgcatcgaggggctgcgcaaatcgttcggcgacaacgtggtgctgcgcgggatcgaccttgaggtgcaacgcggcgaagtggtggtcatcctgggtccgtcgggttcgggcaagtcgacgctgctgcgctgcgtgaacttgctggaaacgcccacggacgggcgcatcttcttcgaagacaccgagatcaccgcgaagaagaccgacatcaacaaggtgcgcgccaaagtgggcatggtgttccagaacttcaacctgttcccgcacctcacggccaagaagaacgtgatgctggcgcagcagaaggtgctgcatcgcgccaaggaggaggccgagaaggtcgccgtcgagcagctgacccgcgtgggcctggccgaccgcgtggactacaagccctccgagctgtcgggcggccagcagcagcgcgtggccatcgcccgcgcgcttgccatggacccgcacgtcatgctgttcgacgaggccaccagcgcgctggaccccgaactcgtgcgcgacgtgctgggcgtcatgaaaggcctggcgaagggcggcatgaccatgatcgtggtcacccacgagatgggcttcgcccgcgacgtggccgaccgcgtcatcttcatggacggcggcttcatcgtggagcagggcacgcccgaagaggtgttcgaccaccccaagtccgatcggacgaaagacttcctgggccacatctcatagttcccgccgcgccccgccccagcggggcgcgcccacatccaagcgaccggcgctccgctcaggatgacggcttgccatgggcgacagtctatccgtacagatgtttcacgtgaaacatcttcgtcggcacttcatagccccgccgcgccccgccgaccaaccgacccggcggggcgcggcgggggtctgcgttgcacagttttgcacgatatgttgcgtctcaagcgctttcggacgccctcgcgctcctccgggcgcacttctcgcgagcgttttaccaggtcgcgcgaaatcggggttcgagcggttcgggtcgaacgcagcatatcgcgcaaaactgtgcaacgcggaccccaagcaccccctccccctcgcccgccccctcccgccggccaacccccgccggctagcccccgctcgcaccctccccgccggctagcccccgcttcgctccccgtcaattcgtccaaaaatgttattcgtccaataacattttttctacaaatgatggtataatgcgccccatagacatctgtcggtacagacgagagtaagggggtgtgcgatggatatcttctccgatcctgtgcttctggcgcgtttgcagttcgcttgcacggcggcgtatcacttcattttcgtgccgttgaccatcggtttgggacttatccttgccatcaacgaaacacggtactaccgttcccgcgacccgaaggacgcggctgccaccaagttctgggtgaagatcttcaccgcgacgttcgtgttaggcttggccacgggcatcacgatggagttctccttcggaacgaactgggcggattactcgaggttcgtcggcgacatcttcggtgcgccgctggccgccgaggcgctgctcgcgttcttcctggagtccacgttcctgggcgtgctgctgttcgggcgcaagcgcgtgtcgccgaagttctacatggtgtcggcctggctcgtgtggttcggctcggctctgtcggccctgtggatcctcatcgcgaactcgtggatgcagaccccggccggcgcggagctgtccgccgacggctcgaaggccgtcatcaccgacttcctgaccgcggcgatgaacccgtcggtatggccgcgctactcgcacaccatcgtggccgtgctcatcatgggcgcgttcgtggccatggccgtttccgcgtggtacctcatcaagaaccgccacaaggaattcgccatgaagacgatgaagctgggcgccgtggtgggcatcgtggtcagctgcgtcatgctggtcacggctcattcctccgccgtcaccgtcgccgaggagcagcccacgaagcttgccatgatggagggcatgtacgactccgaggtgcctcctctgtacgcgttcgggtgggttgacgaggagaaccagaaggtcatcaccccgttctccatcccgggtggcacgagcttccttgcaaccggcacctgggacaccgagtacgagggcctcaaccagctggccgcttccgccgagtacggtgctctcgatcccgaaaccgcgccggtgaacttcgtgttccagacgtaccacctcatggttgccatgtacggcctcatcatgctcaccgttatcctggcgctcgtattcacgctgcgcggcggcaagatccagaacatgaagtggttgcagcgcctggtgctcatctcgccggtgttcccgctcatcgccattcaggcgggctggttcacggccgaagtcggccgccagccgtgggtggtgtacccgtccgcaaccagccccgaaggcgtcagcctgctcacgaacgagggcgtctcgcagtcggtgtccgctcccgagctggtgatcacgatggtgctgttcctggtggtgtacgcgttcctcatggtcgcgtgggctcgcacgatgggtcgcttcatcaaggaagggccggttgcagagcatgagcctgcgttggagggcgccgctgcgggcaagaccccgaagggcaaagcagccccctcgttcggcgacgacctcgcgaaggaaggtgagtagtcatggaaatcacgttcttccaggggctttggttcctcctgatcttcgtgttgatcgccggctatttcgtgctcgacggtttcgacctgggcgcgggcgtgctgtaccccttcgtggcgaagggcgatgaagaaaaggccgttgtgcgcacgagcatcggcccggtgtgggacggcaacgaggtgtggctgctcaccgcaggcggcgcgctgttcgcggcgttcccggcggcatacgccaccacgttctccgggttctatctggcggtcatgctggtgctgttcggcctgatcgtgcgtgctgtttcgctggaataccgcggcatcgaccacaagtgggcgaaggtgtgggacggctgcttcttcgtgggctcgctgctgccggcgctgctgctgggcgttgccgtgggcaacatctacgcgggcatccccatgagcgccaacggcgactacacgggcattccgctgctgggcctcatcaccccgttcacgctgctgtgcggcctgctgggcctgtcgatgttcctggcgcaaggggcgtcctggctggcgctcaaggcgccgaagcctagcgacctgcaggcgcgcgccgcgaagctgcgcttcccgctgcagatcgtgtcgctggtgctgttcgtcgcggtgaccgcctatgctctgctgggcattcagccggcaatggatcccctgctgggagcggttcgctggttgctggccgccctgttcgtggttgccatcgtcgcctccgtgttcttcgcgaagagcaaggactgcgacctgggcgccttcatcgcccagtcgggcgcggcggcgctgctggtgctgctgctggccgcttcgatgttcccgaacttcgtggttgcttcggccgatagcgtcggcccggccatcacggccatgagcgccgcgtcgtccgagctcacgttgatgtggatgaccatcatcacgtgcgtgggcctgccgctggtgctggtctatcacgtcatcatctaccgcacgttccgcggtcgtgtgaaggaagaggatctggcgcactactagagcggatgccgttccttgcatagaagcgaactgccaggagccgtcggaaatccgacggctcctttgctatactgtcggaaaccgcacctgaaaggggattttccatggatgagcagaccgcgccgcagccgcccgtaccgccgcagccgcccgtaccgcccaccgtttccgcgccgcccggttctccggcgcaaccgacgcagccgatgccgcagtccgcgcaagcgcccggatccgcgccttacggtcagcagccgggccagcccttcggccagcagcctgcaggctactatcaaccggttcctccgcaatccaacggcaaggccgtcggcgctctcgtgtgcggcattctggccatcttgttctcggcttctattctgttcggaatcgcgctgggtatcgtcgccatcgtgctggccggccaagccgttaagcaggcgggcagggacggtaaggcgaccggtggcaaggtgtgcggcatcgtcggcatcgtgctttcggtgctggcgttcgtcttgtacgtggttatcggggttggcgtgctcgccttcgtggtcggtgcgtccgacgaatacgatcgcacgtactcgttggaaagttccgacctgtcgtccatcacgcagggcgaccagcagatggaagcggcggcgtctgagaagctcgacctgctgaagagcaaggatgctgtgcttatgcggaagatcgccgaccaagccgacgagcagctggccgacgcgacgggatacagcctcaccgacttgggcatcgaccccttgacgttcgtcgagtggatgctggtcgacttcgactatcagctggacggcgcctacgataacggcgacggcacgggcaccgtgtatgccgatgtgacgctgcgcgattctatggccttcgccaccacgttcatggaagacgcgcaagccgccatcgacaccggcgacttgcagtccctcgacgaggccggcgcgaaggtgcttctcggcgagctctaccaggctgcaatggacaagaccaccgccatgaccacggattacgtaagcttggaggtggtcaagaacggcgattcctggcaggttgacgaagactcctggggcgacgagctagattaccttttcggcctataaagaatcgattcggcttcacggtttccgccgtgccccgtatcgcacggggcacggcagtcgtcgcaacgaaagaaggcgcgcatcatgcgcgccttcttgcttgatgcgggggaggggagctaggccagcttctggcccagctccttggcggcggccgccttgtcgaagttgccgccggtcttctgggtgagggcgcccatgacgcgacccatgtccttcttggaggacgcgcccgtctcggtcagcacctcgtcgatgagcgcggccagctcgtcgcccgacacctgcttgggcaggtagctttccaggatggccacctgggcggtcagggtgtcggtgcgttcctgatcgttgccggccttgatggagccgtccagcgtctccttcgtctgcttgatcaggcgcttcagcatggcgtccacgtccgcgtccgtgatgtcgcggcgctcgttcacctcgatgttcttgatctcgccgtgcacctggcgcaggatggacaacttcggcttgtcctttgctctcatcgcatttttgatctcgtcttgcagctcgtcatagcgcatgggaacctcgtttcgctcgcagtttgctgtcctgagtatactgcaccgtgaaaccccgcccaacccaaacggatgtttcacgtgaaacatccggaatcgttcggctctgcggtgcgtcgtgctggcatgcttgcgcgaaagccgccttcccaacgcccgtcgattccgcggccgcgccgagaagcctgttcccgcgtagcgcatcgcgttagacgatgcgccgacgctctgcaattctgtgttgatgcggctcctggtgacgttgcgtcgctctggtatgatgaagcaagcatatcgacatcgaccagaaggactcgcatgaaagacttgccggcgcaccaactcgatccgaaggtcaaaacggtctggcgcatcaacgacgccatttggcttaccgtggtattcctctgctgcttcgttccattcgccatcgctgcaatggtggatccggcgacgtggatgttcgtcgtcctggtcgccgtcgccgttgcgtacgcagcttgcttgatcgtgtggttgatcgtgctgccgcccatccgcttcatgcgctggcgctacgagctttccagcgactacctcgatatcgcgaagggaatcgtgtggcgcaagcgtttcgtcatccccttcatccgcgtgcagaacaccgacacgcgccagggtcccatcttacgtgcgttcggcctgtccagcgtgacggtggccacggcggccggcgagcatgagatccccggcctcggcgccgacgtcgccgagcagctgcgcgatcgcgcggccgagcttgcgcgcctggcccaggaggacgtgtgatgacggactatcgccaaccgccccaacctccgcagccccagcctcggcccgctgcgccccaaccccagcctgctgcgccgcagcctgaagggccgcgggggagccatgtccatcatagctatatctggttgggcagtctgcgcacggcgttcatgctgctggccatcgtggtcttctcctcgttctcggctatcatcggcgccatctccgagggcgaagccatcacgcgcggcgacatccccatgcttttcatcgtcatcggatccgtgatcgccggtatcgtcgtgctggtggcgcttgtggcggtctaccaggtgatctcgtacaagcatctgtactacgagctagggcccgaggaattcaacctgtattcgggcatactcaacaagaagcgcgtgcatgtgccctaccagcgcatccagtccgtcgaccagcacgccacgctcatccagcgcatcttcggcgtgtgcagcgtcagcatcgacacggcgggcggcgcggcgaacaaggccgtcatcgtgccgtatgtgcagaagacgcaagctgaggagctgcgccgcgagctgttcgcgcgcaagcagtacgccgtagccgtgcgcaacggtgccgcgcccgatgccgccgttgcggcgatggcctctgcagcgggcgttcccgcgcaagccttgcacgagggcgccaatgtgctggacgctcccgccgagatctggcaggacgtgcgcggcgtgttcggtggcgccgcggtggatacgggccgcgtgacctacgagtacggcatgtccaacaaggagctcgtgttcaccggcctgtcgaacaacacggcgttcttcgtcgtggttgtcggcatcgtcggcgccgtttcccagttcatgggtcagatggcgcccatcctctccggttcgatggagccgctcgttggcaacgttgtagccacgagcgttcggctgttcgggggcagcctcatcgccgcgggcgtggcgaccttcctcgctgcgtcgctcgtgttgtggctgctgtctgccatcggcgcttgcgtctcgtacggcggcttccgcgcatgtcgccgcgacaaccgcatcgaagtcgagcacggcctgctgcagcaccgcttccagggcgtcgacgtcgaccgcgtgcagtcggtgatggtgaagcagagcttcatccgccgtctgcttggctactgcgagctgtcgctgggcaagatcgatgcggcggctgaaaactccgacgaccagcagaaaggcctcagccagcaagggctcgtgatccatcccttcgtgaagatgtcccgcgtgcccgagattctcgcgggcatcgttcccgagttcgccgacgttcccaccgagaacatcccggtggcgcccgtggggctgcgtcgcgccctcatccgccgatgcatcatccaggggacgggcttctggttggccgtcctcgtggcggcagggcagatcgcggtgaacctcctggcggatccggccgtgcctgacggagccatgacgttgttcttcgtcaacaacggcgcgctgttcggctatgcgcttgcggtcgtgctgctcgttctcgacgcggtaggagccgtgctgtggttccgtggctcggggtttgcgtacaacgagcgtttcatgcaggtgagcaacggcgggttcgctcgcgagaccatcagcttcccgcgcaaaaagatacagttcggttacacgaagacgaatccttttcaacgcaatgccggcaccgctacggtcaacgcgcgcactgcagcaggggttggaggcactaccatcaggcttatcgatgcccgagaggatgatgcccgtgcgtggcttgcttggctcaagccccacggaaatgtgatacagtagcaccatgaacgcatcaactacatccgacgccaaaggcgctcgaagtaccggctccggccgcagtgccgagagcccttcttcggtcgtgcccgaaacagagcaccggcccgctcccggttggacgccttcgcaattcaagccgaacgactacgccagcatgcacgcgctgcgcaacgaggtgtcgcatacgtcggccagcgccacgaacaaagctcgcgacatccgcgagtacacgctgggggaggagatcgcgaactccgtcacccatggcttgggggcgctgttggccattgcggccatccccatcctcgtggtgcgcgcgctcgacgacggaggcggcatctacctgttcgccgcgctcgtgtacaccctcacgatgctgctggaatataccatgtccacgctgtaccatgccatcgcggtagaccgtgcgaagcgcgtgttcaaggtgctcgaccatagttgcatctacctgttcatcgccggatcctacaccccgttctgcctgatctcgcttgccgattccggcggcgtgtggctgtgcgccttcgtgtggctggttgcgttggcgggcgttgcctgcgaggcgttctgggtgtttcgtccgcgctgggtgtcggccgtgctgtatcttctcatgggctggtgcgtcatctggttcctccctgcgctcatcgaggccatccccgggccgggcctgtggctgctcgtgggcggcggcatctgctactccatcgggtgcatcttctacgtgttgaagaaggtgccgtacatgcattccctgttccatctctgggtactcgccggaagcgttctgcagtttctggccatcttcttgtacgttatgtaagcggtcgcgtgcataagcgcgcgggcatgacagccccacgggtgccgcgaggacgcagcgcgaaagcgcctctccgcgcggccaaagcgcagaggttgcgcatcgtccgcttgtcgaaggagttgcagaagtaccatggatatttggattagcatcgtcgtcacgttcgtgctggtgctggtgaacggctatttctcgatgtcggagatggcgttggtgaacgcgcgccacgtactgctgcagcacgatgccgacgagggcgataaaagcgcccaacgcgcgctgggtctggccgccgattcggggcagttcctggccaccatccaggtggccatcacgctcgtcgggttcttcgcctccgcggctgccgccacgaacctctccgatccgctggcgcagtggctgtccggcttcaacatcgggtggctttccgttatcgcgcccggcttggcccccgtggtcatcacgctcatcgtgtcatacctcagcatcgtggtgggcgagctggtgccgaagcgcatcgcgctggccgatgccgagcgcgtcagcaagatggtggccggaccgctcatggtgttccagaaaatcgcttcgcctttggtggcgttgacctcggcgtccgcgaacgggctgtcgcgcctgttcggcatcaagaacgccgacgagcgccagaacgtgtccgaagaagagatcaagtacatggtcacggacaacgacgagctgctcgaggacgagaagcgcatgatccacgacatcctcgatttgggcgacatgaccgtgcacgagatcatgacgccgcgcgtggacgtgatgttcgcggaagacaccgacacggtgcgccagacggtggagcgcatgcgcggcacgggctactcgcgtctgccggtgtatcacgaggacatcgaccgcatcgtgggcatcgtccacttcaaggacctcgtggcgccgctcatggacggcaaggagcacgagccggtggccgagtatgcctacgaggccatgttcgtgcccgagacgaaggatctgttcccgctgctcgccgagatgcaaacgaatcgtcaacagatggccatcgtcgttgacgagtacggtggcaccgatggtttaattaccgttgaggacatcgtagaggaggtcgtcggcgagatcgtggacgagacggatcgagagaatccgttcatcgagcaggaaagcgagaacgtctgggtggtcgacgggcgattccccgtcgaagatgccgcagagcttggatggccggtggaggattcggccgactacgagaccatcgcgggctggctcatgagcatgctcgactcggtgccccaggtgggcgaggaacttgcgttcgacggataccgcttcaagattcaggctatgcgccgccgtcgcatttcgacggtgcgcgtggaacgactggacgatccctccccatcatgcgtggacgctgtcgaggcgatcgaccgggaggaagcgtgacgagtgaaaaacggctgctccgttcgcgaaaggcgctcataggcggcgtctgcgcgggcgtggccgattatttcaacgtcgatcctgtcatcgtccgtatcatcatggtggtgttcaccctggcctcgggtgggctgctgggcatcgcatacatcctgctgtggatcgtgctgccgctcgagccgaaggaggaggcgccgctcgacgtgcacccccagtcggtgcattccgagacgtacgggacgttcgaattcggcgacaccccgcgcaaaaccgagtcgggggcgcaaaatgcgcccaatcccgcgcaagcggccggttggcgctatgcgcatcccccgtacgcctcggccgctcatgtgccgcccgagcccccggcaggcgcatcgcgcgcctctgccgctgcgcctgccgatgcttctcgttcgtatgcgcctccggcgagccattcgcatgaagggtggatgcatgccgcgccgcaacagcagccgccggcgaagtcgtcgcgctcgggcgtgaaggctgctctgttcgcggggtcgttcctgttgtttttcggcatgtccgctatggtggcgagcatggtcgaaggcgtggtgtggtggcagtattggccgcttatcttcgttatcttgggcatcgtcggtatggtagtccccggcgaagaggggcatcgcatgcgccagttcgtggactcccttatcacgttttccgcgggagtggtgctggtgctgatgagcctcgatgtcatcggatggcgctccatcgagttcatgttggtgggcctatggccgctgctgcttattatggttgggctgctgcttctgggaggcgcgctcaagtcgccgctgcttacgctgctggcagggttgtgcttcgtggcgttctgcgtggtgggattgctgtggtactcggttccgggagcgacggaagagctggttttctcggcgccgtacgggcgcgagtatcgtttcgacatgcagccgtgggaaaacatcggtctaaacgagtcagttgtgatctcgataaccgaatgagcgtgcttgtcgcgttacagagcacatagttcgttcgctttttcccgtgtccgcaactaaggcgaaccacctgctgaaatgcgctttcattcgctgtcaagcgaacaaatcgtgtagggcatctccataaaattttgccctcggacccccttgtccgttaaaatacgttttgtcacaacagcatatcgccctttcggcagcaaaccctcacacaatttactacgctgtcaaccgcttcggcggctgggccgtgtgctgttcaacgaaaggtaactgacgttttggctaaaaagcgctatatacaaaagaagtcgaacctggctgctaaaattatcgcggtcggctgcgcatcgtgcgtgctgaccgggtgcatcggcttcgggttcgcctctgctggaagcggcgccgtgcacgatatcgattctttcggcatcggcggtgcggacgcgaatgtcgccattgccgattctgccgacttcgccaacgtatccgagggttccacccgcgagtccaccgtgcttaccagtaccgcatcgcgcgacatctcgcaaggcatcgaagctatcgaagccgaggaagaagctgctcgcatcgctgcggaggaggccgctcgtgccgaggaggaggctcgtatcgccgccgccgagcaggcgaaggccgagcaggaggccgccgctgcgcgcgatgcagcctccgatgccgtcgcctcgcttcccgaagttgatttctccgtgggcaaagaggctttcgtttccgagtggacctcccgtatcaatgcatacttggccggctcgcccttggcagggcagggtgccacgttcgccgaagctgcctggagcaacggcgtcgacccgcgctggtcgcctgccatatccaacaccgaaagctccaagggcgcgcattgcttcctgccgtacaacgcatggggctggggcgataagagttggtccagctgggaagaggctatcaacgctcacgtagcgggcctggcaaacggctacggctactccatcacgtatgcgaacgctgccaagtactgtccgcctaatacggatcattggttcaaggcgactatcggccaaatgaagatgatctaaacgttccgtcggccacgagccggcggttccttttccatcgtcgaatccttcttccgcatgcgttcgagacgatggccttgcggaatgtttcacgtgaaacattcgttcctaagtgcctgattgccacgttacgcctttgtcgccgttctatggcgacgctggtcgtgcccgcatccatgcagtatgctaagcgcagcaagaaatcggcaccatgcgggtgcctggtgaaaggatcggtatgagcaacgtgatcgtcgtcggctgcggccgcgtcggttcccagctggcgaacatgctgtcggataacggcaacaacgtgtgcgtcatcgacaagaacgtgaacgcgttcgcgaacctggggcgcaacttcaacggctccacggtgcagggtgtgggcttcgacgaagaaaccctcgtcaaagccggtgtcgaagattgcgacgtcatggccgccgtcacccagttcgacaacacgaacctcatgtgcgccgaagtgggcagccgtctgttcggcgtgccgcacgtcatcgcgcgcctgtacaaccccgatcacgagcgcgcgtacatgcagctgggcatcgactacgtgtgcggcacgtcgctggtggccgaggacgtgttcagcaaggtggtgtcgggccacggcgcccatctcgacacgttcggcgagttcgaggtgctgcgcttctcgctggacctcagctccaccgacaagcgcaccatccgcgtgggcgagctggagcgcgatcacgacgtccgcatcatcgcgttcgagcgcagcgacggctcggccagctctattcctacgcgcgactccatcctctacaacggggattcggtgctcgcctgcgtgcgccatgagctgatcgaatcgttctcgcgctatatccaagattaagggagacggagcatgtacatcgttatcgctggcggcggcaagatcggcgaatacttggcttcagtgctgctttcaagcggcaacgacgtggccgtcatcgaggagaatctggccacggccgaccgcctgtcggtggcgcttcaagggcgctacctggtcatccacggcgacggctgcgactcgaagtaccaggaggacgcgggcatccggcgcgccgacgtgttcgtggccaccaccggccaggacgacgacaacctcgtgtcgtgcgagatcgcgcagcgcgtgttcaacgtgccgcgctgcatcgcgcgcgtgaacagcccgaagaacctccgcatcttcaaggaggtgggcatcgagtgcgtgtcgtccaccacgctcattgcgaacctcatcgaggaagagacgctgctgggcagcgtgagcgtggcctcgtcgctgacgcacggcaacgttacgcttaccgagatcgtggtgccgcgcatgcgccatcattccaacgaggccggcatcctggtgtcgtcggttcccatgcccgagaacagcctgatcgcggccgtgtcgccgaaggacgacgacaacgtggaagtggccagcgaagagacggtgctgtatcccggcgacaaggccatcgtcgtggccgacaacgaagtgctcgacgaagtccgggcgctgttcaaggggctgtaggttccgtcggccttgcggctagacagcgccaagccataaagcgaagttgtccgacctggtcggacaacttcgctttatgttttccagagcgtacggttgccttgtttcgtcttttgaacccatttttttgctttgcgacaatggggttgccgaaggggacgaccccatcggtcgaagaggacggagcgaggaggggttcgcatgaaacgtaatttcagcaacgaatcggcaagcacgaagagcatgtctcgtagggcgtttctcggaggcagcgcggtggcgtttggcacggtgatgctttcgagtgcgatgggcgcttgttcggcaccggaaacatccgaagggcggggcgcgggcgcgtctgcaaacagcgagcaggtactttacgagctctacgataccgatattcttatcatcggcggcggccttgcggggtctcatgcggcattgcaggcttacaagcagggaaaggacgttgcggtcgttgagaaggctgccttccatttcggcggtgcttgcggctacaactggtgcaactgggtgaacttcattcaggctgacacgccgtgggatcaatccgaggacttcgttttgaacgagttgacgaacaagaagatcgcaaaggcgacccatgaagcgtttactgtggaggagcgcaatttgctgctgcgctacgcccaagaaggcaacaacctgttcatgcgcgatgaaacaggtgcgtttgtgccgggcctcgatatcccgggctatccgcttttcggcatcttcaacggtttcccgcgatactttaccgattccgtggagcgttcgggcgctcgcatcttcgaccagaccatgatcaccgacatcgtagtcgaagacggtgcctgcattggagcggtagggctgcatgtgcccacgggaacggtgcgcgtttttcgtgcaaagtcgaccgtatcttgcacgggtgcaagttcgtggatttacgggtggaatactgtggctcccacttccatcaattcaccggacaacacaggagatgtagatgcagctgcttttcgacgcggtgcggctctgcaggattcggagttttttcaattcgacctcatcagcatgtatccgacggggcttgcggcgacgttcgtaggaggcatcggcgctgacaatctgtgctgcgaatacatctgcgatgcaaacgacaattactttttccgtggcatggactactccacgctcgatcgcatcacgttcacgcgcacaatcgccaaggcaattcacgacggcggtggatcgccgaatggcggagtgtacgtggatttctccaatcccgaggcgtttgcggccatgggggaggtgtatcgccgtaacgtcgagttgtggaaagaggtgttcggcatagatgtggcatccactaagctcgaatgcgcgcttgaggcttatgagcacggtagcaacccgcgcgttgatgaaaagcttatggtggagggcctgcctggattgttctgcgctcgcggtggcggagtatacggagcgcaaggcggttcatcggtgaacgttgcttatcgagacggctcatacgccatgatgcaagctgtcgagtatgccgagggcgcgggcaaagacaagccgaaggcgttcacgttcgatacggttgaagaggagattaaccgtttgcacgagatacgcatccgtcagacggatggtaagaggcctcaggaaattacccgtatgatacagcgcgcttgctatcgggcatgccagcccacgcgagagactcctgcgatgcaggaggcagttgccgaactagagcgaattcgcaaggaggaaatgcccgcgatgaggctgggagacgcgacgcttacctacaacaccgattggaaggcggccatcgaagcctacaacatgctcgacatcgccgaggcgagttcgaaagccgcgctcatgcgcgaggaaagccgaggccacagctatcgtccggaattccctcaggaagatccagccaactggacgtgcaacattgtcgcgaggaacgtgaacggcgagatgaagctcgaaaccgttcccgtcgtcgagctcgactaaccacgaccgctcacggactcacaaggaggcgctatgaagatcagcgtgcaaaagtacaatccctcggttgacgccgagccttatttcggtacatacgagatcgagcacaccgagcacatgaccctgctcgaggcgctggtggtcatcaacgacaccatcgagcctatcgcattcgattacagctgccgcgggcgcgtgtgcggccgttgcgccatgacgctcaacggcacaccgtgtctcgcctgcgttaccctggttgaggatgcgggcaagaacgaagtcacgccactcaagcattttccggtggtgcgcgacctgattgtcgacaagacgaaggttacggacaaagtgagccgtattctcgctcgtcaacgtgcgtttgacctaaaccttgatgagattaaggctccggtcgacgctggtctgtccgagaagctcgagccgctcgagtactgcgcacgttgcggcgtgtgcacggcggcgtgccccgttgtcgagcagaaggggtttaagtcctatatcggcccaactggaatgatagccattgccaatcgtttttacgatccttacgatcagggggatcgcgttgtccaagccgtgcaaaatggcttgtgggaatgtatagagtgcggtatgtgcgatacggtgtgcaaggctcttgagatcgaccatttgtcggtttggaaggatttgcgcaccgcggcctctgccgaagggttgaagccggtcggcatctaaggagcgatcggcagcgtggggaagggtactctttgagaaaaccgtatggggatgcgggaaggggggtagagatgggcgagtgggagccgaaggggatcctcgacgatgaagacgtgcggatgcggttgcggatcatgcacgctgtagacaagtctctcgaccagatcaaggtgaccgacttatgtgaaaaaatcggtatatctcgccaaatgttctatcggtacttcgatagcaagtacagtctgcattggtggtggccgatgcacgtccacaagttttacttgatagaggtgggccggacaatggattgggaaacaggctatttccatcatctaaagctgctttcgctcgagagcgaattcttcaaggtcgcaacgcagtatacgctcaacttcccaagccagcgcagtatcatgcctcactatcgcaagtgcgcactgctcgagacgctgcaggattacaagcatatagcccttgatgacgatctcatgttttgcctggacagctgggtgaaaaccgagacggatattctgactgagtggtatcgcctggacacggtgccccctctgcaggaagctgtcgagaggcttgcgcgcgtagcgccgaaaatgctgtacgatgcattgcgcatggattgaggtgttgccggtggacgttcggcctcttgttaggccggacgtccacgaggcgacaagtatcgtcttggtgctatcgagtcgcggcggccagctctgccagcgcttcgggcggggtgtaagcgcaggtgccgtcgccgagtgagacgacttccaccgggtcgcccacgttgatcgcgccgccttccagcgccacgaagaagatgccctcgcgcgggaagatgcagtcgcctgccaggtggtagatggcgcacttcgtgtggcacaccttgccgatctgcgatagctccaacagcacgtcctcgccgatgcgcacgcgcgtgcccaggggcagcgctaacaggtcgatgccctcggtggtgacgttttcggcgaagtcgccctcaaccacgtcgaggccggtcgcgcgcgctttctcgatggattcccaagcaagcagcgacacctggcgatgccaatcgccggcatgtgcgtcggtgtccaggccccgatgcgcgacgacggtcgcgccgccttcgcacggcatcttgcgcgttcccttgcgcttcgacacgttgatcgagcggactcgtccgcgtgcgacgatctgccgcttccgtgcttgctccataccgcggttcctccctaaaacctagcataataatgggaaatatactactcgaacaagaatagagaagtcaagcaataagccgcgctctgaagcgcgcttcgggaaggctgatccgtccgggcgcaaagcggcctagtggccgctttgcgcccgcgcagcccgccgccctggctgctcggcgctttccgtgaaatacgccgcgctgccgtccgtttgcggtatgctggttgccatcaggcagaacagggtgaaagggaccggcgtgatcaaccgttacacgcgccccgcgatgggcgccatctgggagttggaaaacaagttcaacatctggaaggaaatcgaggtgctggcctgcgaggcgcaggccgagctgggcaagtccggcatcacgaaggaggaggccgcgtggatccgcgcgcatgccgacttcaccgtggagcgcatcgacgagatcgagaaggtgacgaaccacgacgtcatcgcgttcaccacgaacatggccgagtacatcgacgccgacgtgccggaaggcaccgagccgcccagccgttgggtgcactacggcatgacgtcgtccgacctgggcgacacggcgctgtcctaccagatcacgcaggctatcgatatcatcctggaagacatcaagcagctgggcgagacgtgcaagcgccgtgccttcgagttccaggagacgctgtgcgtgggccgcacgcacggcatccacgccgagcccatgacgttcggcatgaagttcggcagctgggcttgggccctcaagcgcgcgcagacgcgcatggaggaagcccgcaaggtggccgccacgggcgccatcagcggcgcggtgggcacgtactccagcatcgacccgttcgtcgagcagtacgtgtgcgagcgcctgggccttgcggccgacccgctgtccacgcaggtgctggcgcgcgaccgtcacgcgcaggtgatggccggcctggctgtgacggcttccacactggagtccatcgccatgcaggtgcgcctgctgcagcagtccgacgtcatcgaggccgaggagccgttcgcgaaggggcagaaggggagcagcgccatgccgcacaagcgcaaccccatcacggccgagcgcgtctgcggcctggcccgcacggtcaagagcaacgcgcaggtggccttcgacaacgtggcgctgtggtacgagcgcgacatcagccactccggtgccgagcgggtcgcgctggccgacagcttcatcgcgctggactacatgttcggcaagatgcagtggatgctggacggcctgcaaacctatccggccaagatggagcacaacctgtggcgcacgaagggcctcatcttcagctcgaaggtgctgctggccctggtggacaccggcatcagccgcgaggacgcctacgtcatcgtgcaacgcaacgccatgaaggtgtgggaggatatccagaacgccgtggacggacccacctatcgcgaaaacctcgaagccgaccccgaggcgaacctcagcgccgaggtgctggacgagatcttcgacccttgggacttcctcacccgtaaagacgtggtattcgaccgcctcaaggagctggagttctaaaagctgccgcctaccttacgtagaggcatcaggaagccccgtcctgcggggcttcctgtttttgatgggtgcgatatctttgtgccggcttacgcagatggtctgggacggagaaggcgtttaagctggtgtccatacccttacgaggcagtacttcctggcctcgccgtcgaggggcttgtcgtcgatgtttgtgtacgtgaccacggcatcgcgcgagccggtggacgccaggtactcgccgtaatcgtcagcgccgcttttcacgtcgaaggcgaaccagtcgttcgtgtcgaagttgatgcccacgacttgcgtgcgcgacttcaccatgaggtacgacccgcaccaggcaggcggcgcggtagggttgcggctgaaacggaaccacggcgcgttgctgtagtcgccgttcgtcacggcgctggccggggtgtacgtgccgatgctggcgatacctccgccgtactggtagccggcatcgaacgagaacatgaacccggtgttgccgtagccggcttccagcggtttcatggacgtgggcagcgccatggtgtccagcgcttcgcccgtgttggcatccacgcgcacgagctggtagtggatggacgaggtgtccgtgcgcggcgtgatgaccacggagtcgccggtggcgtagggagccgtcgccatgcggccgatcgaggtccacagcgtctcgatgtcgttcgctcccatggtggcgcgcttgaacagcgacggctcggttttcttcggaccgctcgctttcggcaacacctgccagaatgcgcggtttcccacggcggcgatggtgggcatctcccaatcgccgtcgccttcttccaccagcgcgggattgcccagagccgcaccatcggtacgcgcggtgtatatgcgccagacgccgtcgaggatgtccgcctcggcccagatgagacccgaggatgtggcgcgcacgtcgtagatttcgaagccttcgtcggatccgacggcctgctccagcaccacggtggagtttcccgagctcagcgaaagcagcgccacctgggtcagcggcttgccggtgtcggtgggcaagaggcatgcggccaaatcgtcgtcgttcgcccagacgagcgagccgtacggcagctcgtaattccccacctggttcatgagcgtcgttggatcttccgtctggacgaacgtgttggtgaactcgtcggacgcagacgacagcaccgcgtcttcgggcaccttgagcactacgaggttgtcatctgggtcgttcttcgtctgctcgattacgacggatgcgccgccgcccacggccgccaaagcgcccacgcccaacgctccgtacaggaagtggcggcgggtgagcagaacctcgcctccgttcggcgtgggaacgcgaacgccgttgccgccggcgttgccgttagaggtgccgcgcggagcgggggacgatggggagggcgatgcggaggacgagcggcgatgcgcgccgaccgagcccatggcgctggcgctgccgtaccccgccacgttgccgacgtctgcggagcccccgcgacgaccgctgccgccgtgtgctccgccgtatccggcgacgtttcccacatgcccaccgcgcgcgttcggttttccgccggcgtacagcgcgcctccccgggaggctgcgcgcctgttcgcaaggcgtttcttagcaacggtcggtttcgcgtgattcgcgtgtgttgatctgcgggttaccatggtgtttattgtgtcatttcacgcacaggttaaagcgcccttcggtctaattgctacaataaacgcaaacacgaccaatacgctcggaactggtccgcgtagggaacgcgggcgcgcattgtccgagatgtcagcgagcttgaggagtgatccatgagcaacgaaacacgacgcatccttttggttgaagacgaaaaggccatccgcgacgccgtgacggcctatcttgaacgcgagaattactgggtgacggcggtcggcgacggccaggaggcgctcgaggagttctcgaagcaccacttcgatcttgtcatcctcgacctcatgctgccccgcgtgccgggcgagcgcgtctgccgcgccatccgcgacaactccgacgtgcccattatcatgctcaccgctaagggcgaggtggaagaccgcatcatcggtctggagctgggcgccgacgactacctggtgaagccgttcagcccccgcgagctggttgctcgcgcccgcgcgcttctgcgccgcgtgcacgccgattccgagccgcagcgcgaagtgctggagttcggcgagctcaccatcgacgtgtcggggcacaaagtgctggtcaacaacgaggagatcgatctcaccgccagcgagttcaagctgctcaccacgctgtcccgctacccgggtcgcgtgtactcgcgcatggagctggtggagaaggtgctgggctacgacttcgagggctacgagcgcaccatcgactcgcatgtgaagaacctgcgcgcgaagatcggcgacaacccgcgcagcccgaagtggctgcacaccgttcacggcgtgggctaccgcttcgaggatcccacgaaagttgcgcagtaaaccgacgtgcgagacgcaagcgaacaggctgcatcgccagcctccgatgcgcaagaaaccgcatcgcacaccccggtcgtcgagcgtttgacggtcgaagccgatacgggcaccacggggcccatcgtcgtgccgcacgagagcgacggcaaaaagcgccgcggcatccgtttcggctgggacaacctgacgtacaccacgcgcgtcacggccgcgttcgccttcatcgcggccatgaccgcgcttgtggccatcggcgtgctgtcgttcgtgtgggagcagcacttccagacgtatacgcaggccaacatctataaactcgccgaatccacggccgagcagatcgcggagatctactcggatacgggcacgctcgacaacgtcggcatcgcgacggttgcgggctatgcggcaaagctgaacggcgtgggcgtcaagatcttcgacaaccaaaccggcagcgtcgtgtacgattccacgattccgcccagcgaaaacggaaatgatatgccgggcaaggactacagtcgaggatcgctcgcgcctcctcccggagacagcgaccagctggccatcgcccccatcatcaccgacaacgtcgccgtcggatccgtccacatgtgggtgtacggctccgaggcgctgctcagtcagaccgacgaggaattccgtaacaactcgtaccaggccatggtgttcgcgacggcgctcgccatcgtgctggcatcatgcatcggcttcttgttcgcacgtacgctggtcagccccatcaaccgcatgaccaccacggcgaaggccatcaaggaaggcgacctgtcggcccgcaccgagctgcacggcgaggacgagatcgcgcacctgggcgagacgttcgatgcgatggccgactccatcgagcgcgaccgcgagctggagcgccgtctgaccaccgacgtggcacatgagctgcgtacgccgctgatggccatccaatccaccgtggaagcgatggtggacggcgtgttcgaggccgacgaggagcgcctggaaaccgtgaactccgaggtgcagcgcctcagccgcctggtagacgccatcttgaagctttcgcgtttggagagccgctctacgcccatgaagaaggaagtggtcaatgtgggcgagctgatcgccggcatcgtggccacgcacgaggcgttcgtagccgattccggcctcacgctgaagtacgagatggagcaaggcgtgcgcgtgctgggcgacgcggacatgattcgccaggcaaccgccaacctcatctcgaacgcggttcgttacacgtccgaagggggcttggttaccgtgcgcgtgaagcgcggcgacatcatggcgtccatcagcgtgcaggacacgggcatcggcctcacgcccgacgaggcgaagatggtgttctcgcgcttttggcgcgccgacgcgggacgcacgcgcgagagcggcggcctgggcatcggcttgtccgtggtgaaggagatcgtcgagcgccacaacggctgggtgcaggtggaaggccgcaagggagagggcgcatgcttcaccattcacatcccgctgtaccagggtgacgagcagcagcgcgggcagaaatcgcaaaaatcgcgtgggaagtcgcgtaaagaccagaaatagacgataatagggcgcgccgacggagaaggggagcgccgggtgccgcagagcggcgtttcgagagagcaacgaaaggaccagcatgaccggaatcgacatcaagcctgatgcacaagggaaagtccgcgatctgtacgatctgggcgacaagctgctgcttgtggcgacggaccgcatctcggcgttcgattacatcctggaagacgagatcccccacaagggcgcggtgctcacgcagctgtcgtgcttctggttcgagcttctggacggcgtggtggagaaccatctcatctcctccgacgtggccgacctgcccgagcagttccagccgtacgccgactacctgcgcggccgcttcatgctggtgaagaaggccgacatgttccccgccgagtgcattgtgcgcggctacctggccggcagcggcctcaaagagtaccagaagcagggcactgtgtgcggcatccagctgcccgagggcctggtgaactcgtcgaagcttcccgagcccatcttcacgccctcgacgaaggccgagatcggcgaccacgacgagaacatcagctacgagcgcctcgtggagatcatcggcgaggacgacgcttcgcagctgcgcgaccttgcgctgaaggtatacaccacggcgcgcgaccacgcggccgagcgcggcgtgatcatcgccgacacgaagttcgagttcggccgcctgaacggccagatcatcctggccgacgaggtgctgacgcccgattcgtcccgcttctggccgggcgatgagtacgccgagggcaaggaccagcccagcttcgacaagcagttcgtgcgcgactggctgaacgccaactgggatcgtcagggcaacctgccccgcctgccccaggacatcatcgaccgcaccagcgagaagtacatccaggcctacgagaagatcacgggtagaactttcgttccgtttgcctaacggcatccggaacttctcgacgctgcgggcttctgtggcacccgatctcgcggcgatgccgatagctcgcgtaccgaagtacgcaacgctctcgccatccccacgatctcgggcaccacagaagccctcgctgacttttttgtttcctacgagtttgaattgagagcaccatgtcccagcgcaaccctatgaacgaccggtaccagaccgacgagcatcgcggtcagacgcgcaagagcgcggccaccatgaagccgaagacgaaggcggcttcgtcggtgcgcatccagcccaccgtgaagacgaagcagcagaagaaggccgacaagaaggccgcccgcgcgaagcagaccgagatcgatcggcagtactacaacccgcccacgccggagtacaagcgcctgcgcaagatctggtggggtcttttgatcggcgccatcgtgatgacggctatgtcgtggttcggccgcaccttcctgcccgaggtgggaacctatgtggtgctgggcctggcctatgtgtgcatcatcggcgccctgtacgtggacttctcgaaaatccgcaaggtgcgacgcgcctatcaggaagagatgatgtccaaaaaaaccaaggagatgcgcgcagcagaaaagcagcagaaggccgcgcagcgcgccgccaagcagaaggtggaggaggctccggccgtggaggaggcgcctaagaagcgcggcctgttcggcaacgggttccgcctgccgaagaagcaggaggccgagccggtggaggcgaaaacttccgacaaggattcgacgaagtaaggtggggaccatggtttctcgtgtctacgtggagaagaagcccggcttcgacggggaggcgaagcagctgaaagaggagctgcgcagcctactgggcgtcggcgcgcttgagaatctccgcatggtgaatcgctacgacgtggaggggatctcggacgagctgttcgctcagtgcgtgcccaccgtgttcagcgagccgcagtccgacatcgcgacgctggagatgcccgaggcgaacggggcggcggtgttcgccgtggagtaccttcccggccagttcgaccagcgcgccgattctgcaagcgaatgcatccagctgatcagccagggcgagcgccccgaggtgcgcagcgcgaaggtgtacatgctggagggcgcgctgtccgacgaggacgtcgccgccatcaagcactacgtgatcaaccccatcgaagcgcgcgaggcgtcgcttgatgtgcgcgagacgctgcacatggagcagcccgtgccgggcatggtggagacggtggacgggttcctggagctggacgaggcgggtctggcggcgttcgtcgccgaccgcgggctggctatggacctggccgacatcgcgttctgccagcagtacttcgccgaagaggggcgcaaccccaccatcaccgagatcaagatgatcgacacgtactggtccgatcactgccgccacaccacgttcggcaccgtgctggacaacgtggcagtggaggacgaggccgtgcaggccgcgttcgagaagtacctcgagatgcgccatgagctgggccgcgatgaaaagccggtgtgcctcatggacatgggcaccatcggcgcgcgctggctgaaggcgaagggtgtgctgaccggcctcgatgagtccgaggagatcaacgcctgcaccgtgaagtgcaaggtggacgtggacggcgaggagcaggactggctgtacctgttcaagaacgagacgcacaaccatcctaccgaaatcgagccgttcggcggcgcggccacctgcgtgggcggcgccatccgcgaccccttgtcgggccgcagctacgtgtaccaggccatgcgcgtgacgggcgcggccgacccgctggttcccgtgagcgagacgctgccgggcaagctgccgcagcgcaagctggtgaccaccgcggccgcgggctactcttcatacggcaaccagatcggcttggcgaccggccaggtgaacgagctgtaccatcccggttacgccgcgaagcgcatggagatcggcgccgtggtgggcgccaccccggccgatcacgtgcgtcgcgagacgcccgcgtcgggcgacgtggtggtgctgctgggcggccgcaccggccgcgacggcatcggcggcgccacgggttcctcgaaggcgcacaagctggaatcgctcgaaagctgcggcgccgaggtgcagaagggcaacgcgcccgtggagcgcaagatccagcgcctgttccgtcggggcgacgcttgcaagctgatcaagcgctgcaacgacttcggcgcgggcggcgtgtccgtggccatcggcgagttggccgacggcctgttcatcgacctcaacaaggtgccgaagaagtacgacggccttgacggcaccgagctggccatctccgagagccaggagcgcatggccgttgccctggcggccgaggacgtggacgagttcatcggctacgcgcacgaagagaacctcgaggcaacccctgtcgccacggtgacggaggaggcgcgcgtgcgcatggagtggaacggctccaccatcgtggacgtgagccgcgacttcctcaacagcaacggcgcggcgaagcaccaggacgtgcgcgtgctgccgggtgggacgtacgagcgcacctggacgggcgacacgctggccgagcgcatgaacgcgctggtcaccgacttgaacgtgtgctcgaacaagggcctgtccgagcgcttcgactctaccatcggcgcgggcacggtgctcatgccgttcggcgggtcgcgtcagctgacgccggccatggccatggtggcgaagctgcccgtgttcggcgagaccaccacggtcagcggcatggcctggggcttcaacccctacctcactgaggcgaaccagttcaccggctcgtacatcgccgtggtggagagcgtggcgcgcctcgtggccgccggcttcttccacaaggacatgtacctgacgttccaggagtacttcgagaagctgcgcgacgagcccgagcgctggggcaagcccgccgccgccgtgctgggcgcgctgatggcgcaggtggacctgggtatcggctccatcggcggcaaggactccatgtcgggcagtttcgagcagctggacgtgccgcccacgctggtgtcgttcgccacggccatcggctcggtggatcgcgcgacgtcgcccgagttcaagcaggcgggcagccgcgtggtgcgcatcgcgcccgcgtcgtacgacggtgtcacgcccgacgccgccggcttggtggaggcgttcgagctggtggagcgcttgatcggcgacggtgcggcgctggccgtgtccacgccgggatacggcgcgacggctgaggctctgttcaagatgagcgtgggcaacggcatcggcgtgaagctgactgattcggtgacggccgacgagctgttcgccccgtcgtacggcagcttcctcgtggagctggctccgtgcgtggagctgccgcatgcgtccgacgtcgtgcgcgtggacgaggtgggcgagacgaccgaggcctacgagttcgccgcctgcggcgaggtcatcgacctggtcgggttgcaggaagcgtgggagggccacctcgagtcggtgttcccgtaccgcgccgagggcgatgccgtggaaacggtgtccttcaccagtgccgcgccgctggtgtacaacggcaccatcgcgcgcccgcgcgtcatcatccccgtgttcccgggcaacaactgcgagtacgattcggcgcgcgccttcgagcaggcgggagctgtggccgagacgctcatcatcaacaatctgacccccgacaaggtggccgagagcaccgaggcgctggtgaaggccatcgagaacagccagatcatcatgatccccggcgggttctccggcggcgacgagcccgacggctcggccaagttcatcacggcgttcttccgcgctccggccgtcaccgaagcggtgcgcgacctgctgcagaaccgcgacggcctcatgctgggcatctgcaacggtttccaggcgctcgtgaagttgggtctcgtgccgttcggcgacatccgccccatggacgaggagtgccccacgctcacgttcaacaccatcggtcgtcatcagagccgtctggtgcgcacgcgcgtggcatcgaacctgtcgccgtggctgagccgctgcgaggtgggcgacatccatacggtgcccgtgagccacggcgagggccgcttcgtcgcgtcgcccgagctggcggcccagttggctgcgaacggccagatcgccacgcagtacgtggacgagcagggcgtgccgtcgatgagccttgacgtgaacccgaacggatcggtactggccatcgagggcatcaccagccccgacggccgcatcctcggcaagatgggccacagcgagcgccgcggctacggtctgtaccagaacgtccccggcgaccgctaccagcagctgttcgagggcggcgtgggttacttcacggactaggggcttctcgcatcaagttttctcgcgcggcgcatcttcgggtgcgccgcgcttgctatactggttgaaaaaggcctcgcggaaaggcggcttcatgaagatactgggtttgggtgttccggaaatgctcatcatgctgatgttgctggtgcccgtcgcactcgtggtcgcgctcatcgtggtgttggcgaagcgcgccggcagccaacagcctttgcccgatgagcgccagcgcgcgagcgcgcttgcctaccagcgtctttcgcagcttgacgacctgtataaacgcggcgccatcaccgaagaagagtacgcgttgaaaaagcaggagtgtatgcgcgatctgtaagcctgatcggaaaggcggctctcatggggttcatggatgggttcgagcgcgggttgtctggcaattaccgttacgagatcgcggggaaggcggtggtctgctcgcattgcggcggcgaggaattcgatgagcgctcggggcaattgaacacagccggcgcgtcgcttctcaacctcgattgggccaacgcgaccgcgcgtgtgcttgtatgccaaagctgcggtcatttggaatggtttctttaggaggagcatggatcccgaattcgtcaacctaacccccgagaaccttgccgacgagcatctttcctgcatcattcgcgtcaggaagccccatcccggcgtcgaggcgaagcgccaatggctcgccgatcggctgcgcgaaggccatgtgttccgaaagctgcaggtgaaagacccggttttcatcgagtacgcgccgcttgaaacggcgtgggttcccgtgctgggcgacaactacctgtacgtgtactgcctctgggcgtacggtgccggcaagggcaaaggctacgggcgcgcgctcatggagtactgcctggccgacgcgcgagtgcaaggcaagtcgggcgtgtgcctgctgggggcgaagaagcagaaggcgtggctgaccgatcaggcgttcgcgcggaagttcggcttcgaagtggtcgacgctaccgacgacggctacgagttgctggctctgtcgttcgacgggacggtgccgcggttcgcgccgcacgcgaaagcccaggctatcgacagcgacgagctgacgatctactacgatttccagtgcccttacgtgcccgagcgcatcgaggcgatccggcggtattgcgaggcgaacgacgtgccgctgacgctcatccaagtggattcgctgcaaaaggcgaaggagctgcccggcgtctttaacaactggggcgtgttctacaaagggaagttcgagacggtgaacgttctggataccacgtacctcaagaggatcctcaagaaataggagcgttgcagacgcgacaactcacggtgtcctgcgcatcatccagtccgttccctctccgaaggccgagcctttcaagctatggctcgcccaggttggcgccgagcgcatcgaggaaaccgtcgatcccgaacagggaatcgatcgcgcgttcgagctggtgctcaacatgcttgccgatgcgctgagcgacgtcgaggccctggagtcggggatgtccagcagcaccgccctgagcgatgtcagcacccaggagctgctctcgcgccttcgccgtcggacatccccagcccattgagcacgtaggagtcgctggacgtccaacagcggttcgcatcctcgcactcttcgctgcaagctccgggcgcgaatcgccggcgagcggcatcgcccgtgtgcgctcgtcggctctgcgcagcgcgggttcgccgtatgttggcggcttcgttcgggcgcgatcgggcttgccgctcgcgtgcttcttcgccgccgcttgcgggtcgctttcgttctctgctgctcgctgaccgagcgaggcgctacgcccgccatcggtcggcttcggcggcatcggttccgtgattgaatggcgcatcttttaaccgaaaacgctcgaaggcctggcggccccagagcggagaagggagtatgcgcatgcggcagcacacgacgaaccaaacaggcggtgaacggcgttcgcgccgattgcatccggcatggctcatcctcatcgcctgttgcttcctgcaagcgggaggcatgggcaccatcaacaacgcggcgggcatcatggttcccgccgtgctgggcgatctgcagttctcgcagggcagcttcatgctgtacttcacgatccagggtttgtgcatgacggcggcgcttcccgtggcggggaagctgttgccgaaggtgagcatgcgcgtgctggtgagcgtcggcatggtggcggccgcgctggcgttcgcgtccatggggcagttcaacgcggtgtggcagtggtacgtggcgggggcggtgctgggcgtggcggccgcgttcgcgttcctgctgccggcacccgtcatgataggcaactggttcaagaagaaggcgggccttgcgatgggcatcgccatggcctgctcgggcatcggcggggcggtgatgaacccgttgggcggcgcgctcatccaatcgttgggatggcggcccacctatgcggtgctcgccctgatcgcagccgtgctggtgctgccgttctcgctgctggtgatgaagttcaagccggccgacccgcgcgatgcctatggagccgacgaggtggaagacaccccggcgagcagcggagccgaaacggcgtccggcgtctcggcggctcgcgccgtgcgttcgctggcgttcgcgtgcgtgttcctggttgcgggattcctgtcgctcgagagcgcgtttttgcagctgatgcccacgtacgccggcaccgtcgggctcgccgccgtcgcagcgttccttccttccatcgccatgatcagcaacatcgtgggcaagctggtgctggggtggctggccgacgccgtggggccgcgcaacgcgacgctgtgcggcttcggcgtgggcgtgaccgcgttcgcgctgttcctagcctcgaacggcaacgtggggatggtcatggtggcggccgccttgttcggcgtgcttacggcgatggtgacggtgaacgtgccgctgctggtgcgcagcgcgttcggatcgaaggattacggcacgctgttctcgtacgtgagcatcggcacatcgctggtaggctcgctgggcatttcggtgtatgggttcctgttcgaccgcttcggctcgtacgatcccggcctgatgctgggcattggcacgggcgttgcgagcgccgcgctgctgctggtgggtatggctgcggcaaagcgcctgatgggcgccgcgcacgtgcgaagcggcgcggtgcaggcggaggagcccgcgttctaagagcgcgcttttttcttcgggacgatgcgttcgacgatgccctgggtgacgcggtggcctgccagctcggcaagcgagccgagggcgccgaccagggtttcgcgagcggtcccgtcgatgttcttggccgcctcgctcagcagggccaccgttttcgccccgccgaagaagacctcggtggcgttctgggcgcccgaggcctcgacggctttgaacagcgcgtcgacgatggccgccgcttcctcgtcggagtagcgcgccagccattcggtgagcagcgcgtcggtgaaccgggcgttttcggtgaggttgtcgaggtagacgaaatcgtcgccgtcgacctcccacgagaacgggctgtgctgcaaaaggccgcgctcggtgctgtgcaccacgagcggcggggtgtgcgactccatgagcataccgatgacggagtcctgcgggacggtgcggtggatgcggccgtccagctttctccaatcatcgggcgagaacgcgcccgctttgaaaccggggccgtcgtgcgtgtacacgcgctcgatgcggtcctgcacagcggcggacgcgttcagcgcggcgtacagcgcgaggttggcgcccttcgagtggccgcccacgaacagccggcgaggcaggtgcggcgctacggcctccaggtagcgcgcggcttgctcctgggcgggcacgggcgcggtgtagcacatgttgaagttctcgcgccagccggtgatggacgtgtcggttccgcggaagcccacgtaggcgaattccttcttgtagacgaacgtcatggcggcgaactgcgtctgccgctcggtatcgaacaggctgaggtaatcgcggatgaccatgtcgcgaaaccgcgggctggcggcgagtgccagcatattttccttcacgcggccagggatgaggcccgagaacatatgctcatagtgttcggcacgcaatgtatcgaggaagtgggcggggcgtcccgaaggggatagcaggttcttcacgatggtgccgagcctgccgaacgccttgcgctcgcgcagcggcggcacgatcccttcggcgcgcaccatgcagaactgggaaagcgccgccgaatcgaccgggttgaacggcttttcctcgaatgaggcgaactccgtgccgagatagtcgagaatgttcatgcagcagcgctcctagcatccgataccgcctgcgtcgcctctcatcataccgcgtctcgggcgctgccggccttcaatctgccgaccttcaacctctcggcgtttcgtcgtcgatcatggcgagtagctcctcgcgcgagttgatggcgagcttcgcgtagatgtggcgcacgtgggtgcgcacggtgttctcggagatgtagagcttctcggccacatagccgtgattgtagcctcgtcccaggtagtacagcacctcgcgctcgcgcggcgacagcccccgttcggctgccagcgtgtcgcagcggcggtggatgtacgtgcgcgagtcgtccgcgccgtgaggctcggtgcgccggccttcgcgctgccgcgagccttgcgcgaacgatatggcgatgagcgccaggtacacggtgagcatgatgagacagatcgtgcggccgtcggtgccgatgacggcgatgccgcacaggccggccacgaacgcgagcgctagcagcgcgagacaggccgggaatacgaacgtggcggcaaagggcacgctgcggacggcgctggccatgctgcaccagatggccagcgcgatcaccgcgaagctggcctgggtgagcacgtcgatgatacccgctgcgacatcgctgtcggagctgatgacgggcagcgcgagcagaagcgccacggcgatgggatacacggcctggttgagcaatctgagcggcgacgagtttgccttgcgcagcacgaacagcgcgacgacgatggccagcagcgacggcccgatgagcgatttccacgctcccagcggatcgggcaggcgcatctgctcgctcgagatgacgggatcccaggtgagcccgaagatgaagcaggtgatgcacgcccctacgaggggcatccacaatatggcggctgccttgcgcagccggatgcgatggtcatcctcgcttgcgctttcggcgccggcggggtgcggtgccgcagtctcgtcgttgaacgtgcgggcgacgaacagcagcgccaccgatgtgacaagcgagcatgcgatcagcgccaacccgatgggagagggggaaagcggctcggccgcgaaatggacgactgctgccgccacgatgccccatgcgctgttgaacagcaaattctccggttcgagccgcgcgaacaccgagccccacgccgtggcgagcatggcaagtcccgctccgaacgccaggccgaacatggcgggctcggcgaacggcagcgtcagctgcgtgtacagcggcagcatgaactgcactccgatggcgaccaggcaggcgcctgtcaccagaggcgccgtgcgggtgaggtcgggcgtgcgtcgatctgcgcgcttggccaacatggccagcgcggcgagcacgatgcccgcgcccgtcagcccccagccggcgtacaccgcgaaggggtgcagcgagggcgtcgcgcccgttccgtgctcagaaaagaagcggatcgcattgaggaagacggagaacagcagtcccgcgcccagcagcgcgggcttgaacgagacgggcgccggagacgcctgcttcgagtcgtgttgttgcgcgctttccatgccctccctgcaacgcctcggcgttttccctcgtagatagcgcaaatcaccaaattcagctatagggtgggcgcgtgcggcgcaccctgcggattccgaaatcatcgctttcagtgatggcgaaaccccggcctgcaccgtagtgtagccgaacgtccggcgccgcacaacagaagcgggcgacgccgggatcggaacatgggcacatgattgaagggagcgggaacatgggaaccacctcgaagcacagctggtcgcgtcgcgacttcttgaagggggcggccgccggcacgatgagcgtcgccgcgctgggagcgctgggcggatgctcgccgcagcagtcggcctccaccgcctcggcggcggccgccgattccggcgaagcgggcacgtacgacgtgatgcaggagctgtcgacgttcaaccgcggccagaatgccagcgcgaaggcgcctaccacgcccgaagagtacatcgccctcaagggcgacggtgtgctgtccgcgggcggcggctgcgagcagctgggcatcaagccggccgacttcatgctgaacaagccggcgtggttgggcgacgcgcccgtggtcagcgacatcgccgataccgaggactgcgacgtgctggtcatcggcgcgggcaacgcgggcaccgtggcggcgctgcgctgccaggaggaaggcgcgaacgtcttcttggccgatatgcagacctacgacgagtacgacgaatacgcctgcgacatggcctgctacaactcgaagctgttcctggacaaaggcacgcccgagatcgacaccaccgaggtgttcaacgagtacatgcgcctctcgcgcggccatgcgcaccagaagatcgtgcgcgactacgccatgcgctcgggcgagatgctcgactggatggtggggcacattcccgccgagtacgtggagaagtatgcgaagacctcgaactacaagggcaacgacaacttcaacggcgagtgctgcgggcagaggtcgtggccggccatgactcagtggcgcgacgaggaatccaacatcaacatgtggccgttcgtcatccgctcggtgcacgcggcgttcgaggaagccggcggcaccatcaagtggggttaccagggcgtggtgctggtgcaggacggcgacgcggtgaccggggccgtcttccaggatgtcgacggcgcgtaccaccagatcaacgcgaaggccgtggtcgtggcggcgggcgacttcggcggcaaccccgacatgcgcctcgacctgtccgaccagatgcgcaacctggcctggtcgtacggcaacgaccgcaccgacgccaccagcatcgggggcatgggccgcgacggctcgggcatccgcatgtgcatgtgggccggcggcacgatggagggcggcccccgcgccggccaggccgcgggcatcaacggtgtgccgggcttcgcgttcggcggcgcatggccgtgcttcggcaacgacggcaagcgcttcatgaacgagaccatggtgaagcacggctccaacggctacctggacatgcttcccgagggccagctgctggtgaacgtgaccgacgcgaactgggaagagtacctgtcgcaccaagggtacggccacgagacgatggaccgcagctcggactacatggtggaagaagtgcgcgagaacatggcgaactacaaaaccggcaaggacggcttcgacgtgcgcgccttctcccgcttcggcaaagagtactccacggtgtacgctgccgacacgcttgaggagctggccgagatcgtgggctacaccggcgaggccaagacgaactttctggccgaggtggagcgctacaacgagctgtgcgcgaagggccacgacgacgactggggctgcgacccgcagaacctgctgcccatcaaggacgctcccttcttcgcctcgttcggcaccacgggcggcaatccttccggcggcctgtgccagcatgcggccatctgcaccgacggccgctaccaggtgctcaccggcgagaagcagcccattgcgggcctgtacgccgccggcaacacctgtggccagcgctacggcatccagtacgccacgcccacggctggcaatagctgcggttcggcgctgacctccggctactgcgctgccgaaagcgtcatcgaggacctgaaggcgtaaagcggcccgcaaccgattcggggccggttggcgtatccctcctctccctccccgatgccagtcggcccatagcgcgcggcggctgctttcaagtggccgccgctccgcgcgagcagaagaaggagcaacgatcatgacagagaaacgcgatgcgatcgttcaggtgtccgtcccgttttgcgtggacgatcgcgcgcttcgccgcgagggcatgatcctcgggtgggatagcgcgcgcatggcgcgctacgccgacgcgctggtggccgagatcgaggcgaacgcggggcagttcgacgattgcctggtgcgcgccgtgcagctgggcggcggcgtggcatcgaacgcgggcgcggacatcgcgcgcatcgtgcgcgccgtgcggcaggtttgcgacgtggccgaggacgcgcccgtcgccatgcgttcgtccattgcgaacgtgagcggggcgaccatgccgtttttccgacgcgccggggtgacgcgcttcgacttcgagatgctgtcgctcaaccccgtcgacttcgtgcggctcaatcgggtggacaacctgaacgatctgcccattatctgcgaccatttcctgcattcgtacgcgaacgacacgttggggctggtgctggcgttcggccatgatgcttccgagggcggggacggtgcgctcaacgtgcggcgcacggcgctggcggccgcgcgctcgcatgcgacccacgcggagcttgtgcgggtggccgatgagctggcggcgggttgcgacgaggtcgcgcgccagctggacgagatgcgcggcgcgttgaccgagcatggcttcatggagtacctgcctcttcgctttgcgcgcgcaggcaaggaggaccgtttcgcgcagatggcggccgctggcgtgccgcagatcggtttcggcttgggtgcgattacgcgtatcgacggagccgagagcgtgaacacgcgcgacttggcgcgctactgcgccgcggaaggcgacttcgcgaagatcaccgaagaagtgcggaaaacgcgttaggcaccgttgcggaggagcggttgcttccttataatagcaggcgagccgcagggagcggctaactccccacggctctcgaactcgctacggcggttcggatgttattgtgcgcccggttcgtccctctgggacgaccggggttcgtctttcgaccacgcttgaagcgcgagcgaggccgccccgaccgccaagctgccgaaagcagctacgaggccgagaacctgcaagataactccggtaaggctgagtacaataccatccatggaggacacccccttccgtatatctagaattcggaaatggatgtaaagagggtgtgtcatcctccccgcctggcgggttcgtgcttcttagtataacaaccccatctcacgttttcatggcgcacatccagcgcagatcttcctcgatcttactgaaatcccacgcgtttacagtgcggattccacgtttcttgccgctgtttctcgcgcggattgcacgcgctttgcccttcgttcccgcgtggatcttgtcgaagccgtcgcggcgttgctcggcttcgaatatttcacgtgaaacattcgctctggctgtccgtttgacgcgcaagctccggccgcgcggcgtgtcgcctaggcgccgcgtctctcaaagcgccgtgcctcgtgcatccggcgaggccaccgatggcgaaaaagcattgaattcggaaattgcgtagcgaaccgcagacgtgctggtaatcccaatctatcatagtcccaggtcatgagatcgcttgcttccggcgctgctcggcggacccatcccggatgacgcgatcgcttccgaattcgatgtctttttgccattcgctgccctatcggctgctaaaccaggatcgacatgcaccgccgcgcgccgcttcccctgtcgggcggctggcgatcgggcgggacgggctcctggccgatggccgaagagggcttccgagccgccggcgagctttcgcggggcgggccgacccgggctatgtcaattctggtttgacagcggagggcaggtgggctgaccgaaatggcccgcagaagggcacgcacgccgcgcgctgcgcggggagcgggatgtcggacgcggtaggatgtcggataggggaagcgaaagggtcaggatgatatttgagggcaggcgagcaatccggccccgctcgttaaaaagcccgccgcgcgggaggcgcgacgggcttgcaacacggggtgcggagcgcggacgggacggctccgcaacacgacgctgagggcgaacccggtctagttggccgagtcgtcctgctgcccgtcgtcgctgttggacccgtttttctgggcgtactcttccggagtcatgacgtccaccacgttcacggtcatctcgaccacgttgaggccggtcatgtccttgaggtcgccgccgacaacctttttgatgtcgtcgaagatctcaggggcggacttgccgtactccatgatcacgtcgaggttgatcttcgcgttcgtgtcgtcgacgatatcggcgtccacgccctttgtcttgtctgcgccgcccaggccttcctggatgcgggagagaacgttgcccttcatgtcgatgatgccgtcgatcttctgagcggccatggaggagatcttctccacgacgttctcgtcgatgaccagtttgtacaccggctcggcggagacggagtcggccgtggcggcatcgctctttttcttatcggcgtccatatcggagtaggggttgtaggtggaagaggttgctggcttggtcatagtgctctgggtcatggtagttcctttctgtagcatgatggatcggggggggcgaacgcctcgtgctgcgcgaatctcgcagggggatgggcgcggcacgcgaggcgtttcgctagttgaaacgttcgaggacctgtttcatctgctggcgcgtcttgcggtcgccgtcgcggtacttgccgatgaccacgccgatggcggcgaacacggccagcagcacggtgggccagaatcccacgatgaggatgagggctgccgcgacgaagccgatgatgccgtacagcaccgcatggctgtggttctccacgtacggcgagaacgcgcgcttcatgctggcgtacacgcccttgtcgcgcttcgtctcggccgctgcattcgccagcacgtcggacggtgtgtcggccgtacgctgcggagccttctgctcgtcgtgcttctggttcgaagacgcgtaagcgttcgtcgttttcggcttctgcttcgccgcctgcgactgcttgggcgccgacttcggagccggggtggccgcagggtggatgcgcatggtggactgagtcatcgtcgcatcacctactcgaccacgtgggcgggcaccggtttggtctggtgctgacggcgcgtgtcgtcggtatacttcgtggcctgctgcgtgaacgcgggtgtaaccacgtcggcgtcgcctgcgaacgtgatgcgcacggagtcgacggggtagccggtgaaggcttcaagcgtcgcggcgatctcgtcctgcagcttcgcgcccagctgtcccagctcggcgtttcgacccggatcgatcttcgcgtggatgctcatgcgcgggtcgtgcttgttcgtgatgtgaaccttgacgttgtccgtggacaggccgtgatggctctcgacgacgtgcttgaccgtggactggatggcgttctgcgtgatggcgatgctgccgttgtcgcgctcaagctccagctgcgagttcttgcccggagcagtgatggcgcgaatcaacacgaccagcaggcccagcgccgtgatgcctagcagaacggcctcgacgacgaagaaccacggcatgctcatgagccaggcgattgccgggaacagcggttcccaggcgaaccaaagggctgcgagcacgccgatgcccagcacggcagcaacgacgaacacgatcatgcaaaagcgtttgaactttcccatagatgccgcctttcttctagaatgcgcacgcccgatggcggtgcgctgccggatagagtgggactactctagaagaaagccgcaacgggcgcgcctggccgcgcaaaagtgccgccagccgtttgccgtgttgttgagcacccgtacccctttgcatgtccgacggctcggtaaaggggttcgggtcagtctatttgcgtgaacctgaacagctgcggacgggctatgggctcggtcgggccggggttcgcctcctcttccgcggcttgcgcgcgcagggcttcgccgtaggcgcgcagcgtttcctcgaggttgtcgaccggggttatgacgtaggttttcgtttcggtcgttccatcgtcgtacgtggccgtcaccttgagacgcgcctgcgcgatcatgtcggcgtatttgcggatgagcagcgcattgaggttttcgtgcatattgacgttccattttcgacgatcgccgtagaactctcccgtcgtggcatcgtacagctccgccacctctccctccaacgggaacgaaacgcgcagggcgtgccatatctcggtcttgttcgcgttctgctcgtcgtagttcacggtgaagctcgtggtgcgatcttccgtataggggtcgtcgccctcctggtaggagaattcgggcatgcgggcgttcgtgtagaacagcacgcggtcgccttccaccgtgtaggtgagcgaagcgacgttcgttcccgtgcaggagaggtcgaacagatgggccactgagaggtagcgctgccccgagtcgggcgcgttgtcggcgttgttcggatctatctccgggtcgctgcgccacactttcgtgaagccgccgtatccgaagtcgtctgtgcccgcatcgagggcgaaggagtttttcgccgtcgcattgtcgagttgctgcgagatggcgaacgcgacgccgctcgcaagggcaagcacgcaagcggctgcgatgacggccgtgacgaagcggcgcgtacgatagccgctttggttgcaggtgcgcggtcggcgggtaggcttcgcgtgcaccgcctccgctgtgcgcaggcggtgcgcctcgcgcatcacgcgatcgtgcacgcggcctggcatctctatgtcgtccatcagcgcgcggtactggtcctgctcgggtgattgtcctgtccgtttcaaaggatgccccctttccccagcatcttcccgagttgcgttcgagcccggctcaggcgcgagcgaaccgtagcgggcgcgcagtgcacgaggcgggcgatttcctcggtcgagaatccctcgtagtagtgcagatgcacgatcaggcgcatcttgtcgggcaggcgtcctagcgctcgtccgagctcgctgtcctgcagggcgcgtgccgcatcgtcgctgcgaggatcttcgcggcccgcatcgggaaccgcgtcggtgagttcggcgcgtcgtttccaggccgaacggtgcaggtcgcggcagcggttgatggcgacgcagagcaaccatgccttgagatgctcgtcgtctttgaaagcggttgcgtctttcagcaggcgcaggaacacgtcttggcagatgtcttccgcgtcgtgcggggactgcgtttggttgagggccaggcggtagacggtgcttccccaggtgcgcatggcgcgctccatgaagtcgtcctgcctgagcgttggttgcatacggggtatcgcctccttgccaccaacacgaaaccggcttcggaaatgtgcccggaatgagaaaaaagcggcgaagcgggatttctcgccgcttcgccgcctgtgagcgccgccgaagggcggccttatgtcgcgggatcgccttttctggcggttccgcgcgacgagaccttttcgccgagctgccctgttgcgtccgccgccttcgctttacgcgtagatctctttctcctccacgaggtcgttcttgatcttgcccaccagcttctgcagcgcgtcgatgcagttcggtcggatgtcggcgccgatgagcacgtacatgatggagtcgcccacgttgagcacgccctcgttcagccacgtgcgcacgtagtatacgcccggccaggtgagggcctcttgcaccgctgcctccacgccggccgcgtcgtaggagaattccacctgggcgacctcgcccaggccctcgacgccttcgcgcacctgcttcttcggcgtgatgcgcacgatgccgttgtgggtgaggtacatgccgcactgcgcggcgttcggatcctgcttcgcttccgcgagccattgatcgatggacggttcctgctgagccatgccgctcccttcctcgaggatgatcgccccattatacgccattgagaatcgcgggagacgttgccatgaaggggccttgccgccgtcggccatcgcgtacggctcgtgcgggctcgcttcgtcatcgacctgacggcggattgggaagcgaggcggcagagatcgcgcgctatgcacgattatcggggctcgtcttcgaaggcgaagaaggaaagcccaggtcggaagaaacgacgatggcggagaatcgtacatagcgcgcgatctctgccatgcggagacgattcatcgcgggaccctgccggcacgggcaccatcctgcatcccgcttcgacgcgcacagatgtttcacgtgaaacatctgtgcgcgggcgggagcgaagggacgcgcgggcgggagcgaagggacgcgcgggcgggagcgaagggacgcgcgggcgggagcgaagggacgcgcgggcgggagcgggacgcgaggcgcggggagcatagacgcgcacatggggcgcgaaacgcggggagcgggcggatccgaagatgtttcacgtgaaacatctgtgcgcgttggttagaaagcaaccgtcgaccttccataacgttccccctgcatggagcggcgcttcggccggcttccaaaagccgtttagcgcctgccgcagggtggatgattgcgacattttcgatcagggtgtcgccgtgcgcgagcggggatgatagactaggcgaatccccaggacgcacgaaaggaatcgcatgtctcttcccgcagccgacttgagcaaacaaccggacaaccgcaccaccatggagctgggcgcggtgcttcccttgaccgccgaggtgaaggacgaccacctgtatgtgggcggcgtcgatatggtggagctggcgcgcgagcagggcacggcgctgtacgtcatggacgaggcggacatgcgcacgcgcatggaaacctacctcgcggcgttccgcagccgctatcagaactccgatgtcgtgtacgccagcaaggcgttcctcaacaaggaggccgcgcgcatcgtagccgacgaggggctgtgcctcgacgtgtcaggcggcggcgagctggccatcgcgttggccgcgggcttcccgaccgagcgcatcttcatgcacggcaacaataaaacgccgcgcgagctgcgcgaagccatccaggcgggcgttggccgcatcatcatcgacagccgcatcgagctcaagcgcatctccgagatcgcgggcgagctgggcgtcgtgcagcctatttacatgcgcatcacgccgggtgtcgaggccgacacccatcagtacatccgcacgggttgcgaggactcgaagttcggcttcaccatgcgcgacgacttcgcctacgggtgcgtgaaggacgtgctggcggccccgaacgtgaggctggcgggtctgcactgccacatcggctcgcagatattcgcgctgcattcctaccctgaggccgtcgaggtcatggtggagcttatggcgcgcatcgaggaagggtacggctatcgtatagaggagctggacgtgggcggcggcctgggcatcgcctacacggccgacgacaagccggcttccatcgacgagttcgccgaaacggtcacgtcggcggtgcacgcggcgtgcgagaagttcggcgtgcccgagccgcgcctgctcaccgagccgggccgcagcctggtggccacggcgggcgtgacgctgtacacggtgggcattctgaaaacgctgccgggcatccgcaagtacgtggcggtggacggcggcatgtccgacaacatccgcacggcgctgtaccacgccgattacgagccggtcatcgcgaacaaggcgggtcagccgcgcaccgagatcgtcaccatcgcgggcaagcactgcgaaagcggcgacgccgtggtcatcgacatgccgatgcagcaccccgacctgggcgacatcgtcgccgtcttcggcacgggcgcgtactgctacactatggccagcaactacaacggccagccgcggccggccatcgtgttcgtgaaggacggccaggcccgcgtgaccacgcgacgcgaaacgtacgaagacctgatgagccgagacatttaggaaaagggagcgcagcatgacggtaaaactgggactggtgggcacgggcacggtcggcggcgggtgcatcgacatcctgaagaaccaccgcgaggatttcaagcgccactacggcatcgacgtggagctcgtgcgcgtgtgctcgcgcaaccccgagcaggctatcgcgcacggcgtggaggacatcttcacgcaggattaccaggacatcctgaacgatccggacatcgacatcgtggtggagctgatcggcggcaccaccgtggcgcgcgacatcgtggtgggcgctctcaaggcgggcaagaacgtggtcacggccaacaaggcgctcatggcaacgtacggcgaagaggtcatgggcgcggccgacgaggccggcaaggagatcgcgttcgaagccagcgtgggcggcggcatccccatcatcgacccgatgaagcactcgctcatcgccaacgagatcagctcggtcatgggtatcgtgaacggcacgacgaactacatgctcacgcgtatggtggaggacgggctcagctacgacgccgcgctcaaggaggcacaggagaagggcttcgcggaggccgaccccaccgccgacgtggacgggttcgacgccgccgcgaaaatcgccatcctcgcgtccatcgcgttcaactcgcgcgtgaccatcgacgacgtgcacaccgagggcatccgcaacgtcaccacgatggacttggacgcagcgcgcgacatgggctactgcgtgaagctgctggcgctggcgcaccgcaccgacgagggcgtggacgtgcgcgtgcatcccacgatgctgccgctgtcgcaccagctggccaccgttgacggcgtgtacaacgccatctacgtcacaggcgacgccgtgggcgagacgatgttcttcggcgagggcgcgggcgcgggcccggccgccagcgccgtgatgggcgacgtggtggaagtggcgcgccatgtcacgctgggcgtggggccgctggtgggctgcacctgcaccgacgagcttcccatcgtgccgatggacgacctcaagacgaagtactacatccgcttcaaggtggccgaccgctcaggcgtgctggccgcgatggccggcgtgttcgccaagcacaacgtcagcgtgtactcggtggtgcagcgcggcaagaaggaaagcggccaggtggatctcgtgtacgtcacccacaccgcgcgcgagaagagcgtgcgcgacgtgctggccgagatcgccgagctcgacgacgtgctgcgcgatgagcccagcgtcatccgcgtggaggagtgatcctgcgcgcacatcgacgcccctcgaacggcctcgcctcgtgcggggccgttcgttttacactacccccttagcagcgacctgggcttcctctataatcatgccttatcagagggcatattggcacatcggggacagagaggggcgctcgtgcaattcgcagtagattcgctcctcgacggactgtccgagctcgtgtacatcagcgaccccgacacctatcagctgctgttcgtcaacaaggccggcaaagaggcttacggccaggacatcgccgacggaacgcacctgtgctacgccgcgctgcagaaccgcacgtccccctgcccgttctgcacgaacaaccgcccgagcggcggcgcgttcctcgaatgggagcacacgagccccatcacgaagcatcactacctgttgcgcgacaagctgatcgactggaacggcaagcaagcgcgcctcgagatcgcgttcgacataaccgatcacgaccgcgagaaggaatcgttcaagttcctcgcaagcgcgaacggtttgaacgtcgaatgcatccgggttctggagaacgacgatctcgatgcggcgctcaacgcggtgttgggcatggtgggcgagttcttgcaggccgatcgcacctacatcttcaacatcgtgagccatcgcatgtggaacgcctacgagtggtgcgcgcagggcgtgtctcccgagatccagaacctgtccgatttgccgttgtcgctgatcgatcactggatcgagcggttcacccgcggggaagcggtcatcatcaactcggtggacgacctgcaggacggcgagcgcgccgacgagtacgaggcgctgtccgtccagggcatccagtcgctcgtggtcgttccgctcgaagtggacggcaggctcgtaggctatatgggagcagacgatccgaagaaaggccgcctggaaatcattgagaagccgctggtcagcctggcgtcgttcatctccgccagcatgaagcgcgcgatggcggagcgccaggttgacgagctgacctggaaagacggattgaccggtgcgtactcgcgcagcgcgttccatcgcgattacgactgcgggacgttcgagagcatcgggttcgtgctggtggatgccgaccgtcttgcggtggtgaaccgggagcgcagccgcgacgagggcgacgaggtcctgcggcgcatctgctcttccatgcgcgaggtgttcggcgagggcgtgtaccgcatcggcgacgacgagttctgcgcggtggccctgccgcttgaatacgaggagttcgaccgcatgacgcgcagcctgacggcccgcttcgccgaggccgggctgcccgcttcggtggggcttgcctggagcgagcgctgcgaagacgcgaccgtgctgctgaacacggcgggcgaccgcatgcgccgcgtcaagatcgggcggcatcgggcaaccgatctgggcatcgacttggcgcaggacggagcggtgaacgacctcatccgccccggcggcgcgcgggacgcggtggaggccgggctgctcgacatcttcctcatgcctcaggtggcaacgcaaaccggtgcgctggtaggggccgaagcgctcatccgctacctcgaccccgagcgggggatcgaggtgcagccggcatccttcgttcccgcgttggaggacatgggcgagatcgccgatgtggacttcttcgccctgacgcgcgcgtgcgagacggttgcgcgctggcagcgcgaaggccgtgcggcagtgcccatcgcggtgaacttctcgcgcatgacggtgggggaagagggatttgtcgatcgggtggcggaaacggtcgcgcgcttcggcgtggacccgtcgctcatcgagatcgaagtgaccgagtcggcgcgcgggcgcggaggcgacctgctgcgctgcgtggcggacgatctgcggggccgcggtttcagcgtggccgtcgacgacttcggggtggacaacgcgaacgtgtcgctgttcgtgcagctggaattcgacgtgctgaagatggaccggtcgttgatctggggcatcgatgccacggatcgcaccatgcgcgtggtgagcggcctcgcgtctttgtgcgacgacctgagcatcgagtcggtggccgaaggcatcgagaccgagcagcaactggaggcgctgaagacgacgggatgcacgagggcgcaggggtatctcatcgggaggccgtccgctatcgacgagttcgagcggcggttcatggcgtaaggacgcgatgcgccgcgaatgcggagcgccttttcctgtgggcgctttatggcagcaacatgtcagttcgatgacatcggctcgtcttggtcgaaaaataatcttactttaatactatatttcttcagagatcgaaagcggccgtgcgacggtcggcgtcgtgcgcggaagcgcgtttgcgctgcgtgcggccaggcaggcatgaaggagaagaggttcgcgtgaagggttttctggagcggttgcagtggaagctgtcgggcatgatgcaggggcgccgcggcgccgacacattctccaacttcttggtggttgcgggtatcgtgctactgttcgcctcgctgattcctgggcttgacctgctgtcttgggtggcgctgatcgtgctggcgtattcgctgttccgcagctactcgaagaacatcgccgcccgcgaccgcgagaacgcgacgttcgagcgcatcgtggagaagccgcgcaagcagctgtcgctgatgcgcaagaagtggacgaaccgcaagaccacgcgctacttcaagtgcaagggttgcggccaggtgctgtcggtgccgcgcggcaagggcacgctgcgcgtggtgtgcccgaagtgcaagaccgagacgaagcagaagtcgtaaaggtccgccgtggatatcgcagctttcaagcgcgagctgttcgccatcacctacgacttgcagaagatactgcacgatacgatgacgccgatctgccaggagcacggcctgacgttgcagcagatgcacgtgctggtggagctgatgcgcacgccgggtttgaccgcgggccagctgagcgaccgcgccggcatcctgcgcacgaacttctcgcccgtgtgccgcaagctggagaatcgagggctcatcgagcgccagcgcagccagaccgaccgccggtcgctgcggctgcatgtcaccgacgaaggccgcgcgctgttggccagcgtcgacggcgaggtgcagcgtcgttacggcagggcgttctcggccgagccgcaagagacgttcgatgcgatcctcgaaggtttccaggcgctcagcgccttttcgggaaagctggtgcgctgaggatgttcggatacgtggtgccccgtttggagggcttggacgaagccgagcgcgaacgctaccatcgagcgtactgcgggttgtgtcgcgcgatcggcgagcgatgcgggcagcactgtcgcttggcgctgacgtacgacctggtgtttttggcgctgttgctgggctcgctgtacgagccggaggagcgcgagggcgagggacgctgcgcgccccatccggtgaaggcgcacgggttcgtgcgttcggcatgtatcgactatgcggccgacgtgacggtggcgcttgcgtactacaagggcctcgacgactggaacgacgatcgcagcgtgcgggctcgggcgtttgcgggcatgctggccggatcctaccgtgccatccgcgaaaggacccctcgcatctgcgaggccgtcgagacgggcatggccgacatcggagccatcgaggccgctgcgcgcgaagcgggcgccgctccgggcggcgaggtgcccgctcccgatgcggcggccaaccgcttcggcgtgctgatgggcgagctgttcgtgtaccgtcccgacgattactgggcggacgacctgcggacggtgggcgcccgtctgggcaagttcgtgtacgtgatggacgccgtgatggactacgaggacgaccgggcatcgggcagctataacccgctggttgctatggatatgagcgcggaggatatgcgcgaggatctgcacctgctggcggcgggcgtggccgaggcgttcgagcgcttgccgctggagcgcgacctgcgcctgctgcgcagcgtggtgtacgcgggcgtgtggcagaagtactacgcgttggaaaacgataaggagaagcgccgtggttgagaatccctacgacgtgctgggcgtgagccgtgatgcgtccgccgacgaggtgaagaaggcgtaccgcaagaaggctcgcgagaaccatcccgatctgaacccgaacgatcctgcggcggcggatcgcatgaacaagatcaacgaggcgtacgaccgcatcgtcaaccccgagaagtacgcggcgcgcgatcgtcgcgccggggcggcatccgggccgcagggtagcgcgggctacggaggcggcgcgggatacggcggagcaggcggcggagcaggccaggggcagggcgcgggcggttcgggttacgggaccgaggggccgtacggctggtcgggcggcttcgggttcgacttcgacgacctgttcggctttggcggcgcaggttacggcagccgcgagcccatccatcccgaggcggccgcgggcgacaacgtacagatgcgcaacgccatcgacgccatcaacgccgggcgcggtcagcaggcggtggacatcctgaacacggtgaccagcgacggccgctcggcccgctggtactacctcagcgcgctggccaacgacgcggcgggcaacacgctgatggcgctcgagcagatcaggcgcgcggtgcgcatggatccgaacaacccggactaccagcgcgcgcagcggcagttccagcagactggccaaacctaccagcaggaaagccaatcgcaaggcttcagcatgggcatcgaccccagcatcctctgctgcggcatctggtgcctgggcccctcgttgtgccggctgtgcgggatgccgttttaggttccggcggcctgccggccgtcggaaccgctcgacgctgcggcttcccatggtgcccgatctcgcggcgagtccgagggcttgcgtaccgaagtacgccacgccctcgccctccccacgatctcgggcaccacggaaaccctcgctgacgctacgaactaccggtgattcgagttttcgcacttgcacctatgcaatctcaacccgaaaggacgcactcatggcaacgatcggcatcgacttaggaacgacgaacagctgcgcggctacggtggagggcggccggcccgttatcgtgccgaacgcggaaggggagcgcaccacgcccagcgtgatcgcgttttcgaaggaaggcgagcgcctggtgggaaccatcgcgtgccgccaggcggcggtgaaccccgaccgcaccatcgagtcggtcaagcgccgcatgggcagcgattggcgcgccaacatcgacggcaagccctactcgccgcaggagctgtcggccatgatcctgcgcaaactgcgccgcgatgccgaggcgtttcttggccaggatgtcacgcaggcggttatcacggtgcccgcgtacttcgacgatgcgcagcgccaggccacgaaggacgccgggcgcattgcaggcctcgacgtgctgcgcatcatcaacgagcccacggctgcagctctcgcctacggcttggacaacggcacgccgcagaaggtgatggtgtacgacctgggcggcggcacgttcgacgtgtcggtcatcgagatcggcgacgacgtcattgaggtgctggccacgtcgggcgacaaccatctgggcggcgacgacttcgacgagcgcgtggctgcgcacctgctggacgccttcaagcgcgagcatggggttgacctgcggggcaaccaggcggccatgcagcgcgtcaccgaggcggcccgcgaggcgaagaaggagctttcgtcgctcgataccgcgcatgtcaacctcccgttcttggcgcagggcccgtcgggcccgctgcacctcgaggccacgctcacgcgcgccgcgttcaacgacatgacgcgcgatctggtggagcgcacgtcgggtcccgtgcagaccgcgctcaacgacgccggcatcgccgcgtccgagctgggctgcgtgctgctggtgggcggctccacgcgcattccggccgttcaggaccatgtgcgcaagctcacgggcaaggagccgtccgcgtccatcaaccccgacgagtgcgtagccatgggcgccgctatccagggtgccacgctgtccggcacgtcgacgggcctggtgaaggccgataacagcatcctgcttttagacgtgacgccgctcagcctgtccatcgagacggtgggcggcgtggcgacgcgcctcgtggagcgcaacaccacgctgccggtgcactactcgcaggtgttcagcaccgccgccgcgttccagaccagcgtggagatccacgtgctgcagggcgagcgccccatggcgaaggacaacaagtccatcggcacgttcaagctgaagggcatcaagcgcgcgccggccggcgtgccgcagatcgaggtgacgttcgacatcgacgcgaacggcatcctcaccgtgtcggcgaaggatctggacacgggcaaggcgcagtccatcaccatcgacgactccggccgcatgtccgacgacgacatcgagcgcgccattcgcgatgccgagcagtacgccgcgcaggacagcgagcgacgcgaggccatgctggcgcgcgaggaggcgcagggtctgctgaacgaggtggaccgggcgctcggccaggttggaaagcagttggagaaagacgagaagaagcaggtcaaggccgacgccgaaacgctgcgcaaggcgctgtcgaagcgccccgccggtttcggcaagaaggcgcgcgaggccgaggcggcgtcggttgacaacgtgtccgacgtcaaggcggccgccgagcgcttgaggacatcgagcgcccatgtgcacgagctgctggggaagcaagggtagggggcgcgggatctgacatgtcgacggcggcgggcgagatgctcgccgccttgggcgcaaaacggcgcccatgacaatgtttcccatggagaactcggagtcagggcgcctcgagaagcttgcgagctgggcatatgccgatccgcttctcgacgatccggcgcaagggggctgaaaggccgcccaaaattgtcatgggttgcattttgcgcccacgtcccggcggtcggcgctttctagtatcatggttcgcagcgggcgcgcggctgcgcggtgaaagagaaggaagggacccctcatggagcagtacaagcaagagttcatcgagttcatggttgaaagcgaagtgctcaagttcggcgagttcacgctgaaaagcggcaggaagtcccccttcttcatgaatgcgggcgcctacgtgacgggcgagcagctgcaccgcttgggcttgtattacgcgcgcgccatccatgatacttttgggctggacttcgacgtggtgttcgggccggcgtacaagggcattccgctgtcggtgatcacggtcatcggcttgcaggagctgtacggcaaggaagcgcgctactgctccaaccgcaaggaagtcaaagaccacggcgccgatgcgggcaacctgctgggaagcgagctgcacgacggcgaccgcgtgatcatggtggaggacgtcaccacgtccggcaagtccatagatgagacgtatcccgtgctcaagggcgcggccgatgtggacgtcaagggcctcattgtgtcgctcaaccgcatggaagtgggcaaaggcggcgtagtgactgcgcagcaggaagtgcaggagaagtacggtttccccgtcgcgtccatcgtgagcatggccgaggtgaccgaatgcctgtacaaccgcgaagtgcaggggcgcgtggtcattgacgacgacgtgaaggcggcgctggatgcctactacgagcagtacggcgtgaagtaaggctgagccgaccccctggtttcttcagctgttcccgtccaagcgaatgcgaaggcccgatcgacgccatcatgcgcgtcgatcgggcctttcaggaggggaggggattttgggggtcggctacttcgccaggttcttcgcgatcatgcggccgaacgtgacggtgcggccgcaggcgttgccggtcgagaggttcggatacgtcatggagtagtatccgcccgagtcgttgccggtcacgtacagaccctcgatcacgctgccgtctgcgcgcagcgcctggccttgggtgttgatgttgatcccgtccatggtgcacaacagcatgccggtgttgcggatgccgtagaacggcgggtttcgcacgggtgagagacggaacggctctttcccgaaatcggggtcgacctgattatcgtagttctcgttattgcgctccaccgtggcgatgagcgcgtcggcgggcaacccgagcttcccggccagctcttccaaggtgtcggctttttggatgtagcccttggccgccagctcttcgttcatgcccataaccgcctggatggggatgttcggcgcggcgccgttgtcgaaggggaagaggcgcgagcatccgtgcatgtcgaattgctcggcgtaggtggcgaaatcggcatcccagagcgtgacgtggatggaacccggctgctgggcgtcggagtgcagcacgaagtcgtacgtgccggattcgttgcagaagcgctcgccgttcaggttcaccttgagccagggctggcttcccatccagaagagcgtgcctacgccgcaatcggctccgccaagcgagtcggccggcaggccgccgcgatcgaacagcatgctggaatgcgtatcgtccatcttcgcacccgcccacaggcaggccttgatgccgtcgccttcgcaacccggctgcgcggagttgaacccatacaggctggtggtatgcggctgcagcgccttctgcatgtcgacgttgatgccgtagccgccggtggataccagcacgcccttgctggcgttgacctggatgtatccgttctcgcctttgccgatggcgccgaccaccttgtcgccttccacaaccaacttgaccatgggcgtgttgtagcggaacgtcacatggccggtcttctcggcgtaatcggacagcacggtgaatccgttaagcgagccatcttccggccaggcgggcgaatgaccggttgcccagtgcttgtagttcgtctcgtgcttttcttcggcggcttcatgccagagcttcacgccgtactggtcgagcacggtctcgtaccagtcgatggtttcgcccgatttttcgtaccacgtcttatgaaggttgagattgcattggcctgcggcgtagtggttcatgtcgagcaggtactcctgcagatccatcgtgtatccgctttcctgctgaaggcgagagttcacgcctccgacgtcgtcgcgcacgacgccgccgttgtacttctccagaacgaacgtctcgatgccctcttctccggctgcgcatgcggcgaacaggccgcctgtgccagcgccgacgatcaggaattcggtgtcgatggtttcgacgatgtcgctttcctgaacggtcggctccgagcccagccaatcggacgatgtgctgcccgtttcagcgttcgcttcttcggcgcccttgttctccttcggcgcgcatccggccagtcccaaaacggctccggtgcttgccaaggctgttcctgcgaggaagcttcgacgagatatgccctgtgcatgtttggtgctcataggtccctcccttgttcgcgagttgtgcaggcggtgctccgcgctgcggcggttcgagggtgcatcctagggtcgccgtgggcaaacttcatcaccctcagtgggtaatttttgggtaaccccaggtagaaagcttcttacgccggttaaccagatggagtgtttcggctacaatacgggcatgttgagatcacgggagcagaacggcgagggggtcgcgccgccgaaggcgggcttgttctcgtttgcgcagggccttgcgttggcgttgctgacgttgagcagttggtcgctgaacgtgcatctgtttcctctgtacgacacgcagctttccttcattcgagagctgtgtacgttagcgaacggcgccgcgctggtggctgtcgccgtcgtgtcggtgcgtcgtccgcgtgcgttgcgcaggcaggtgctcatgggcattgcgatcttcggagctgcgggagggtcgctgctcgtgtgggcgggtgatcggctgggatcgatgggcgtcatgctggcaggcgcctgcctggtatccgttgccgagggtgcgtgcgcgatcctggtgggcatagccctgtgctctgttccgacgaagctcgcgtccatctgcatcgtgacgggattgctggcatgcgccggcgcgaaacaggcgattgcggtgggctattcggagtttgcgcttgccgtccatgcagccctcttgctaggagctgcgttgttggcgaatccgactgcttcggaaacaatggcacggctttctcgcgacgaatcgccgcacgatatggccatcacgcagccttcgtcgttcttgccgttcggccatcaactattcgtctgcctccttctgttcagcgcggtccagggcttcatgctcacgttcggagaaaccgggggcattcctgccacgtcgatctggagcctcgcgattttggcggtggtccttgttgtcgcatgccttgctccccgccggttgacgaccgatgcgcttttgaagctggccgcgctgcttgcgatcgcggggcttctgctcgttcccgcttcggacttgattcggttctccatctcgaacggtttgatcagctgcgggatcgctgcgttcgacgtgttccagtggatcgtgctcacggcgttggcccggcgcaacatgcatggtgccgtttcggttttcgcttggggctccgcgatgcatgccattggcgtcatcctaggagccaatgccggccgtttcgtgaaccactattggacgagcgatgtgcaggtggtggttctggcggtggctggtatcgtgttttgccttgtcgttgccatgtcggtttttctgcagcacttcagtttcgagaaaaccatcaacggcgtgcgcgagagcgttccgcctgttttggtcgacagcgcagatgaagacgatgcttccgaggagagggctctgaccgttgacgagcggtgcgaggtcctctcgcagcagaaggggctcacgaagcgagagaccgaggtgctgcacttgctggcgcgcggtaggacgggcgtgttcatccagcacgagctatgcgtgtcgtacaacaccatcaaagcgcacgtgaagcatatctaccagaagctggacgtccatacccatcaggagctgatcgatctggtggaggatcttgggtagctgtctcgcactcggatgcgttaactctgggcaaaatcaagaccctggtcaaactcggatgcgaagtttctgatactctttcgtggaacaagaagacgattcgccgggcgccggtttagcggcgttcggcatgccttgagggggtatcgtatggacgcattccgcatcggcgtgatcttcgattgcgacgggacgctgatcgactcgatgatggtgtggcgcgagacggaagccggtttggcgcggcgtgcgaacgtgacgttgacggcggccgaaatcgatgcgctcaccgcgatgaccattcccgagtgcggcgcgttcttccacgagcgcttcggcttgggttcgtcgggtgacgaggtggtcgccatgatggacgagctcatgttggagttctaccgcgagcgcgctctggcgcggccgggagcgctcgagttcgtgcaggcgttggccgagcgcggggtgcgcatgagtgtggcgtcgtccagcccgcagccgtacttgcaggccgggcttgagcgctgcgggttcgcgccgtacctcgacgccatcgtgtcggttgacgacgtgggcgcctcgaagcgcgagcccgctgtgtacgatcacgctcgcgaggcgatgggcacgccgcttgccgccacctggggcgtcgaggactcggtgtacgccgtgcgcacgctgaaagccgcgaactaccgcacgctcggcatctacgactgcgatatctcgggcacgtgcgagcagctggcagccgaggccgagcggttcatcacgaccttcgaggatttggacgtcgacacgttcctcggttggaactaaaagaggcgaggggtgcttcgacttgaagcgccccccgttttgttcccgctagatctgcttctcgatccaggcgacaagctcgtcgtaactcatagtaccgttcgcgacggcgatgacggtgtcgaagaagtcctgcgtacgaggcttgaactttactccgttaccgtgtaggaaggcgatgatgagagccgttcccgttcgcttgtttccgtcgtcgaaggggtggttcttgatgaccccgtagccgtatcgagccgctttctcatgcacggaaggataaagatcttgtcctccgaaagaggcgaaaggctgagctagagccgaatcaagaagcccttcgtcgcgaactcctggcattcctccgttacgtttcagttggtcttcatgaatggcgagcacgatatgcttgggtatgggagaaggatcgcgcccgctcatttcgacagagcctcaaacaaatcgcggtactcgtccgcagcttccaagtatgcatctaaatacatggttccattctcgccgtccgaggcattgtcgtcgatgggaacgatttttacatagggtttgcttcccttgatgaccgttacctcgatattgtcctcatacacgcgctttgcaatggtcggaaattgcgcgcgggcttccgatgccttgactgtgaggggcatggcgattcctcctttcggttttctccggttgctatctatgccgatattatagcataaaaaacagctgaaaaaagagcataatcgaggatcaaatgaaagaggaagttctcttatcgccaagggtcttcctggaaggtcggctcgggggttggcgggcggtcgctgaacgggtcgtagccgtcgtcgtcttcctgggcggggcgcaggaacgggtcggatgacgcttcggacttcgaagccgcgctcttagtcggctgcgcgcctgcgaccggcgtcaccaccggtcgcaggatgtagcgcggtttgcgctgggagtcactcatggacgctgtcctcttcggtgcctactttcgccaaatcgtagggcgtggtctggtacacataatagttcaaccagttcgtatacaacagctgcgcgtgcgcgcgccaggtgacgcgaggggcttgcgtcggatcgtcgttcgggaagtagtggctaggcagcggcatgtccaggcctttcgcgatatcgcgctcgtactcggccatgagcgtgtcggcgtcgtactcggggtggccgaacacgaagaaatgccggctgtcggtgctcttcgcgatgtagacgccggcctcgtcggagacggcgatcagctcgaggtcggggtgcgcctcgatgtcggcagcgtgcacctcggtgtaacgcgagtgcggcgctcggaacgagtcgttgaacccgcgcaccagcggcgacgacggcttcaccacttcgtggtcgaacacgccgaacagcttgttctccagctcgtacttggggatgccgtaatggtggtagatgccggcctgcgcgccccagcagatgtggaaggtggagtgcacgttcgtggcggaccagtccatgatgcgcgcgagctcgtcccaataatccacgtcctcaaagtcgagcagctcaaccggcgctccggtgatgatcatgccgtcgaagcgctggtccttgatctcgtcgaaggtggtgtagaacgtgtcgaggtgctgctcggacacgttcttcgcctcgtggctggccgtttgcagcaggctcacctcgatttgcagcggggtgttcgacagtttgcgcatgatctgcgtctcggtgacgatcttcgtgggcatgaggttgagcagcagcaccttcagcgggcgaatgtcctggtgcatggcgcggtactcggtcatcacgaagatattctcgccctcgagcacctcggtcgcgggcagggagtcggggattctgatgggcatgggaaacctcgcatttcgtagatcgtcgcggtatcgcgcgggcacgctggtgccggtcgtaacggtctgtatcatgataccttctaatcagatgaccggtttatctgaattatcgataacatgctatcggaagatagaactaccgtcgcgtaaaccatgatggcataatgagccggatcgcaagagcgcaatccgcaatcccgcaacaaggagcatccatgagcgaatccatcagcaccacctgcgtacagggcggctaccgtcccggcgacggcgagccgcgccagattcccatctaccagtccaccacctggaagtacgacacgagcgagcacatgggccgcctgttcgacctcgaggaggccgggtacttctacacgcgtctggcgaaccccacgaacgacttcgtggcggccaaaatcgccgagctcgagggcggcacggcggccatgctcacgtcgtcgggccaggctgcgaacttcttcgccgtgttcaacatcgccggcgcgggcgatcatgtcgtagccagctcggccatctacggcggcacgtacaacctgctggccgtgaccatgaagcgcatgggcctggaatgcacgttcgtttcgcccgactgcaccgacgaggagctggaggccgcgttccggccgaacacgaaggccgtgttcggcgagaccatcgcgaatccggcgctggcggtgctcgacatcgagcgcttcgccgccgccgcgcacgcgcacggggtgccgctgatcgtggacaacacgttccccacgccggtgaactgccgtcccatcgagtggggcgccgacatcgtgacgcactccaccacgaagtacatggacggccatggcgccagcgtgggcggggccatcgtggactccgggaagttcgattggacggcgcatgccgacaagttccccggcctgtgcgagcccgacgagagctaccacggagtgacgtacaccgagcgcttcggcttgggcggcgcgttcatcacgaaggcgacggcccagctcatgcgcgacttcggcgccatccagtcgccgcagaacgcctacctcgtcaacctggggctggaaagcctgcacctgcgcatggcgcagcacagcaagaacggcctggcgttggcgcagcatctggccgcgcatccgaagatcgcctgggtgcgctaccccggcttgccgggcgacgaccaatacgagctggcgcagaagtacctgccgaacggcgccagcggcgtggtgagcttcggcgtggccggcgggcgcgccgcggccgagacgttcatggcgaacctcaagctggcgcagatagccacgcacgtggccgatgcgcgcacctgcgtgctgcatccggccaacgcgacgcatcgccagatgaacgacgcggagcttgcggccgcgggcatcacgcccgacctcatccggctgtcgtgcggcatcgaggccaccgaggacctcgtcgccgacatagaccaggcgctggcggccgtgtagcgaagcatggtaaactgacccgcagagaagccccagcggaaaagccggtttggaattcggtcgcggaggtgccccatggaacgcaagaagcttttcgtgcgcgttggcataggcgtggcgggagcgttgctgctggtcggcatcttcgcggttgcgaatgccgtgggcgattcaaacgccatgcgacgaggcatcgacgaagggttcgagctgagaggcacctatcagggggatcccggccgggacggcatcggcaccatcgcatttcagacgctcgacggcgagccctcgtgggaagcgtcgaaggctccgggcgcgcatgtcaaaggcgcgttcaaggaaaccgtcgatccgaacatctacgtgctggaagacgagagcggcaacggggtcggctgggtccatcttgcgtactccgatgcccagggggcgggagcgctgtacgtccgctacggcgcgggcgacctggtggagatgcgcaaggtggatagggtgcccggttatatgcgctacgataacgaacgaaatacctgaccaaatgcggttcgctctcgcggccgcggacattcgagcccgctcgcttcccagcgcgcgggcttttcgcttttccacgaaacgcaagccctttcacgtccggtggtaaatagtttctagtcgcgtctcgatgccttgaagtgcatgcgccgcatctgcgaacatgcacgtgagggccgggaggggtgctcatgatgaagaagctcataatggacgatttctcgctgttgggcaacgctttggcgctggctgcgaagaaggcgccgacgctcgagtcgttggcggccgagctcaacgtgcgtcaggaggacctgtcgctgtgttggttcgcgctcaacaacctgcgccgatgccaaggccgcgtgctgcccgtccccttcgaggcggttgcggaggggccggccgacgttcgatccgtttcgggcaactggtacgcccccacttggcgtttgaacaagctgcttgaagagttccaagttaacgagggattggccgtgcattacgggagcattttgagccatcccgagggtggtcacttcgagttgaaccttgcggccgacgaagtggtgcgcgcggttcgtctggagaacgccgagctcgacgcggtgaggctcaggcgcgtgtgcgtgcaggcgcgcgagcccgccaacggcatcgagctgctggtatcgaatgccggcaagatactgataagcatcgaggactaccgggaggggccgttcaccgtagcgttcatcgagcgtctgcacgaacggctcgtcgaaggcatttccatcaaggaggtgcgcgagatcgagggctgtggcgagagcgcggcggatgagctgcgcgcgaaggcgctggagtcgttctgcgctcacgtgtgcgcgcccgacggtggccatactttagtggatgctttgatagcgctttgctatttcaaggcgttccacctgttctctgccgggaacggtgttcttgcctatttgctgtacttcatcgtgctgcatcgtgccggctatcatttctcggcgcatgttcccgtcgtcaagctattgttcccgcttgatgacgacgatcgcgtctgcgattcgccccttgtgcccgaagagctggtggtgccgtgcgatggcttctgcgattggacgctcttcttcgagcgggcggtgcagatgctcgtcgaggggcagcgatggttcatgaccaaactggacggcatggcgcgccgtcgagaacgttttcgcatcatcatcgattccgacgagagcatgaacttccgtcagaaggaggtgctgctggaggccgtgttacacagcaatgcggaattcacctacggcatccacgcgcagcgttacgacgtgtcgtatccgtgtgcgcgcagcgatttcgcccgtctgctcgatcagggtttccttcgccagcacgatgacgggatccgccatttcttcgtggcctcggacgagttcgaggatgtgttcgcaacctatgtgagggagcgctgcgccgaagcccttcaccgatactaccgtgaggacggggcgctgcgcgacgaatgcaaaagcccggacgacattgctgctgagtataaccggggcgtgggattctatgaaaagtccctgctggacaagacctatatcgagcattacgacttccggcgcacgcctatcgccgactgtgacggtccgcggaggcgtcgccgctcgaacgacgagtgacggagggcgaaggggaaggaggatttcggaagggcacggccgattccattgtcaaaggagggtcaatgaaacgcatcatgagcgggcaatcgtgctcgcacggtccaagcaagacgaaagtactggttgtgctgctggcgattgcgctagtggcttcgttcgcagcatggggctgcagcccgaaggccgcgaacgacgacgcgaaagcgcctgagaaaaaggcggaaagcgccgcaagcgagaaggccggcgacggcgtggacgagttggcggcgtacagcgggttccccacggaaggccgcttcatcgacaacgtggccgcgctccccggcttctacaagaacaccgagaagaacgaggccaacgcgaaggcgaaggcgccgcgtcgctataccgaccgcaacggcaacctcgtgcaaccggtccctgccgatgagctgggatggaacaatacgtacctcgatgccgacaaacgcgggtgcacatcgtgccacacgttggagaacgcgctgatgagcctgcctacgtaccatcgcctgatcttcttcgggtatcccaccgagcagggctatcagaactgcatcgcgtgccactccgactcgtattcggggcataagctggccgatgccattcacacgctgcatatgaacagcacgatgttcctgaacgacgacgacggcaactgccagtcgtgccactacatcaaccccgacaccggcgtgttcgatcgctgggacgaggtcaagtacgacctgtacaagggcatcaccgacgtgaaggccgacgagctgaaggcttcggtctcctacgatcagaccacggtcacgccggctgaaaaccgcatcttcaagaccgtgaaagacgagcccagccagtggttgaccgacgattccaagcaggataagtccatctacgagaactgggtcatctccatcgacggcgattgcgagaaccccgtcgagatgacgcttcccgagatggagcagcagttcggcaccgtgaagcaggtcatgaagatggactgcaccatcaacggcgtgggccaggccaccatcatgcagagcgaggtggagggcattccgctgaaggccatcatcgactacgcgaagccgaaatcgggcgccaacgtggtgagccccatcggcagcgacgggtacgactacgcgaagatgggcatcgactggctgcttgagaacgacgcggtcatcgtcacgaagatggacggcgagctgctgcccaactcgcagggctatccctgcatgatctgggtgaacaagacgtccggcggcaacttcacgaagcgcatctccaacctcacgttcatgacggtgcccgacgacaagatcgacgccgagctgtacgtgggccagttcaccgacgaccgcacgggcgagatctactccaagcccaacagcggcgtgctgaactatcccaccggcatcgtgctgtccggcgaggaggcgaagaccgtgcatctggagggtttcgccgacgcatgggacgagcccatcaagaagatggaattctccttcgatcacggcgagacgtggaccgtggtggacacgcccgacaacaacgccgacaactggacgtactggcgcatggacttcacgccgcccgcggccggcgcctacctgttggacatccgcacgaccagcatcacgcccgacggcgccgatcgcgtctgccagtacgacacccagttcatgttcacggtagagtagggggtacgataatgaaaacaacgacgcaacgcggtcgtgccacgatctctgccctcgcggggttcaccatggtcgcctccatggcggccgcgccggcggtggcgctggccggcgaacccgctgccgacgagcccgtggccgccggcggcaccgaggccgcgacgaacggcacggctgtcgagagcgcacaggtcacgcccgcccaggtggagggcgagttctcgttcgaccagaccaccatcacgtccaacgaggtgatcaagaccttcttccagcgcgtgtcgcaggccatctgcggcgcgacggtgcccctcgtggcggacaacccgctgggctggaagctgtccgtgtcgggcgacgtggaaacggcgttcaccgcttcggtgggcgacctcgccaacgaggagtcgaccagcaacgtgatgacctgcacctgcggcggcaaccccgccggcgggcgcgccatcgtcaccgcggacgtgacgggcatcccggtggagcatctgctggcgaaggccggcgcggctccgggtgcgaacgccgtgacgttcgtgtcggccgacggcacgcagcagacgttcccgctgggctacgtggtggggcgccatgcggtgctgtcctacgagatcaacgacgaggacctgtcggcctccgtgggcggcagcaaccagctgtggatgacgaagacgccggcgaactacttcgtgcgcgacgtcgtggaaatcgtggtgtccaccgaggacgtcgcgcccgcgactccgggtgcggccgacgagcatcccaacagccccaacgcgggcgtgctcgcgggaacgcagggctagggggcgcacgatgatcgctccgatgcaggtatccgtgggcaagccggtgacgttcagcgggtacgccgaggactacggcaagcagatcgtgtcggtgcagttctcgctcgacaacggcgcgaactggaccacgtacgacgtgtcggattccaccgacgatctgtgggtgcactggacgttctcgtacacgcccgagcggcccgggttctaccggctgctcgtgcgctcggtgaacgacgccggcgcggccagcccgctcgcggacgtggccgagttcacggccgcctaaggtgggggaggggccgggtgcagagcgccccggctcctcctcagcgccgttccgtccgatactcgcggggagtggcgttgtagcgccgtttgaacgcggcgctgaatttactggggttcgcgtagcccacccgtgcggcgatggtggcgacgctttcgtcggtgacctcgagcagcttcgcggcctcctgcaagcgcctttcgcgcaggtacgtgggaacgggcacgccgtacactccctgaaagtagttgttgaggctggtcacgctgatgccgaacgagtcggcgatgtcgcgcagccggtagtcgcaccccagatcggcgcacagccgatcatgcgtcgtccgcgcgatgcgcatgtgcgatttcgtgtaatacgaatgtcggcgccccgtcggcaacccccgcgccttgacgtgcagcagcacctccatgaaccgcagcttgccgcgcggcgcatcgaacgggtccaccagcgcctcgaacgacgccatgagcgcgttcagctggtcgtctccctcgaacagcaccgcagggtcgagctgttcgatccaggagccgaaagagaaacccgcctcgcgcatcactccgtacgccggctcgttcgtcaccccgtcgctgaagcacagtttgatgccgcggtatcggccgagcgggtaccggtattcgctcggcaggcgccgcgacgcgctcaggcagcagtcgcccggtttcacgatgatcgcgctttcgcccggcatggccacctcgcaccgtccctcctggcagtagtccagggtgatccagcacccgcgaacctcttgggcgttcacgaggatggggcatatctccaagttgaaatcgaccgttgcgatgaagagacgcggcgaggcgaagagcgttgtcatgcggccgcgcccctgctcgttctcgacgagcagcgtgtgggcgccgccgggctcgacaaccacgcgcatgccgcggtcgagctgcaaggtgccgaatggttcgagtacgttcgtggtggcctcctgtcggtcggtccttcgttcctattgtatcccgccggtagttagaaatggctaactcgtttgcgtttggagcagaagaagacgcatggagttgagtggagcgatcgcaaacccttacccttgtcgcgcgacctctaggtacgacaaggagaaatcatgagcaaattgagcgatgcggccacgggagacgtggctgtgatatccggagtggaaggggatgcgcggttcgtcggacgcgtcacgtccatcgggctgaccgtgggctgcgaagtgcaggtgctgcagaacgtgcgcaagcgaccggtgctggtgtacgggcgcgacagcgtgatagccgtcgatgccgaagactgcgcccgcatcgacgtgcaggtgcgctcgtgagcgcgcgggaggcggtgctcgaagagctggacgccgcggtgtccgcgccatcgggcgcagcggtggtctccggggcgcccacctgctccgtcgccttgctcggtcagcccaactcgggcaaatcaaccctgttcaacgcgctgaccggttcgcggcagcgcgtggggaactggccgggcaagacggtggagaagaaggagggcggtttttcgcgcggcggcgtcgattacgcggtgtgcgatcttcccggcacctacagcctctcggcgaattcggaggaggaagtggtcacgcgcgactacatcgcctcgggcagggccgacgtcgtatgcgtgctcgcggacgcctcgcagctggaacgaagcctgtacatgctcgccgacttcgcgggcgtcgattgcgcctgcatgctcgtgctgaacctcatggacgtcgccgaggcccagggcaagcgcatcgacgcgagggtgctggagcgcaggctcgggataccggtcgtgccgttcgtcgcggccgatcgcgcgcactgcgacctgttctatcaggcgctcgatcgtgccatcgccgaccctcatgcgcttgatgcgaccgcgctggccgaggcgtgccgcgtcgagttcggagccgtctacgacgacgtgcgcgccctcgtgccggagcggagcgtcggcgcgctgacgccggcttggctgacgggcaagctgctcgagggcgacgttccggtccgcgcgctggtcgacgaagcgctcgacgaacgcgatcgagcgcgcttggcggccgcgctcgagccgatcgagcacggcgtgcagcgtggagggacgtgcaagttctcatggatcgacggggtgctcgacggcgccgttcggggttcccgcacccgctcgacgctctcgagattcgaccgcatcgccacgggatcgcgctggggcaagcccctcgccatcggcatcatcctggtggggctcctggcgacgttcgtccccgccatgcccatcatggcggtgggcggcctgttctcgctcatcggcgagtacgcggccgcagggctcgtcgccctgggagcgcccgctgtgctgggcagcttcgtgagcggcgtcctgttcgacagcctgcgattcgccacgatgatggtgggcttcgtgttcggcatcaacctcgtgttcggcgcgctcgaggaagtgggctacatggcccgtatctcgtacgtgttcgactccacgatggcgcgcttcggcctgcaaggcaagtccatcatgccgttcgtcgtgtgcctggggtgcaccatcggcggcgcgtcgggcacccgcgtcatcgactcatggggtcagcgcgtgctgaccgtcgccatggcatgggcggtgccctgcgcttccacctggggcgtcgtgccggtgctggcggtggcgttcttcgggccgtggtcgcctgtcgttgtggtggccatcttcctgacctcgttgctgctcatgtacctcgtgggaaagctgttcgggccgcacctcgtgagcggcgacgagcgcgccggtttggtcatggagctgcccccgtaccatgcaccgcgctggaagaacgtgttctcgacggcgatcgcccgctcgaagcacgtgttcaagcgagcggtgcgcgtggtgttcatcgtgaccgcggtggtgtggctgctcgtctacagcccggacggcaacccgcagaacacggccctgtacgcgatcggcgaggctatcgagccggtgaccagcttcttcggcctggggtggcagacgttcatggcgtacctatgcgcgatggccatcaaggagtcggcgttgggcgtgctgtcggggctgtttctgggcacggggacgctcaccacggccgttggcggcatggggccggtggccgccgacatcggccaggtgatggcgtcggccatctcgcagcccgaggcgctcgcgttcatgttcgcgttcaccttcaatgtgccatgcatggcctcggtggcggctacctacggcgagacgcattcggggaagtggacggcgctcatgatcgcgttctacttctgcgcatcgctcgcgctcgcgttcgtcgtgttccacgtatcgtcgctgttcctggggtaacgtcctcccgcgcctccccggagcgcctagcgcatggcggcgcggtaggcgctgggggtggtgtggtgggtgcgggcgaacagctcggccaggcgctcggggcggtagccgacggctgcggcaacctgcgccacgggcgcgtcgccggcggccagcagctcggcggccttcgcgcagcgcaagcgctggcggtactccacgatggtgcagccgcacgcctgcttgaaggtgcgccgcagcttggtctggcccatgcaggcgatgcgggccagctcgtcggcgtccacgggcgcggccagctgctgctccaggcgccgccgcacgcgctcgatggcgtgcatgtcctcgctggccagttcgctggcgcgctcgccggccatcgcgcgcgacttgtccacgacgagcgccaccgcttcctcaaccttgctgcggtagaacagccgcgccgacgcgccgcgtccgcggtaggcttccacctgcttgagcagcaccaccatctcggggaagtcggaaagcccgtcgatgctggcgaacgcctcctcggcgctgaaggcctcatcccggtacacctcgcgcaaatactgctcgtaaaacggcggggcgagcatgatctcgacgttgcggatgggcgtgccggcccggcacaggcagtcccaatgcggcgtgtccagaacgtgcccctccaggtaaggtgcctccaccgtgcggttcgtgacgctctcgacgcagcttcccgacaggtagtagcgcaccgagacgaagcgcggatgccggcattgctcgcggaagtcgcgggggaacagcatgtcggtcgccgagatggcgaaatcgcgctcggcgtacagccagaagtatcccgaggccacgtcgcgcggcatgcggaacatgcgcccctcgcgttcgggcgcgcccacgtccgccgcgcacgtttcctccatctgcatgtcggcgaggcaggggaggaacacctcgcgcatgatgtcgtagtcggcgcatgcggcagccgtgccgtcccgatttccgtctgcgcgaatcaacgcgccctccttccgttccaacgcgtttgcgcgcccgcccttgcgcccggacgcgctcgtctctaagttagaccaggataacatgatagagcgataggagcatatatggcatcatcagaaaacaaacgcgagctcatactcacccgatcgcccggcaggctcatggtgtcgttgagcctgccggctatcgtgggcatggtggtcatcggcctgtacacgttcgtcgacgcgatctacgcaggtcagctgatcggcgttgacgcgatgggtgcggtgtccatcgcatacccgttcacgttcatcaactcggggctggcggccatgatcggcatgggctcggcctccgtgctgtcgcgggccatcggcgcgcgcgatcagaagagcatcgaccaggtgatgggcaacctcgtcgtcatgaacctcgtgctgtccctcgccgtgacggtggtgggcgtcgcgttcgcccgcccgctgctcgcgctcacgggcgcggaaggcgccatgctcgacctgggggagtgctacctgcgcatcatattcctcggcagcctgttcgtgaacttcgcccaaagctcgaacatgatcatgcgcggcgagggggagctggcccgcgccatgggcatcatggccggcggcgccatcctcaacatggtcctcgcgccggtgttcatcctcgcgctgcgcgatcaggggctgggcctggaaggagccgcgtgcgccaccgtgctgtcgcaggctgtgctggcgggcgtgatgctatggtggtttgtcaagcgcgagaagacggcgcgcatcgtgcgcgtggcggcgtcgcgcgcggtgctggccgaggtggcgaaggtgggcgtgtcggccatgctcatgcaggtgctcacgctcgtccagcaggcgatcatctaccgcgcggcggccgagtggggcggcgcggagtggcaggtgctgttcggcgcggcgctgcgcatccagtcgttcgcgttcatcccgctgtggggcatgagcaacggcttccagcccgcggcgggcacgaactacggcgccgggctgtacgaccgcgtgagaaggtgcaccgtggcgttctcgctgggggcgacggggcttgcgctgctgttctggatacccgccatgctgttccccgaggccgcgttgtcgctgttcatcaccgatccggcgctcgtggcgcaaggcgttgacgacttccgcgtgttcttcgtcgcctatctggcgatgggcgtcatggtgatgggcatcacgctgttccagtcgttggggaagggcggtttggcggcgctgctcgcgcttgcgcggccgttgctgctgttcgtgccgctcgtgctgatcgtgccgaacctgggcggtctcggcatccacggcgtgtggctggcctgcgcgatcaccgacggcttgctggcgctgatcgccgtcgccctcatggtgcgcacgtgccgcgggatggggaagggccgcgcgcggacggccgcgatcgaggagggggaagccgcgcgggcgtaacgcgcaggcggcccgggtcgcgcggcaggcgcgcgtcccgggccgttcgcgtgtctgctagccggccagcaggtttccgacgcgcaggcattcggcgctggcctcgtcgtcggggtagtcgtaggcgatcacggaatcggccacgtcgacgccggcttcttcggcgcgcttctcccacagctccatccactcgccgtcgttccactcgtacgagccgaacagcaccaccttgtgaccggctaaatggggctctacctggtcgtacatcgggaggaactccatatcctccagctcttcgtcgcccatggcggggcagccgaaggcgagggcgtcgtagtcctccacgcgctcggcggtgaagtccgcggcatgcacgaggtcggccgtgccgccggccgcgcgcacgccttgcgcgatgaggtcggccatggcctcggtgttgcccgtgccgctccagtagacgattgcaaccttgctcatagggtatctccttcgtgtcgagggatgtcgcatgcgctctctgttgagcgaggtgcgcgacgaagccgcgccgcgcacctcgctcaacagagccgcgtcccgcgtctcacgtgccgtccgctcgcgcgctagccggccgcgcggaacgcctcggcggcggggaagtcctcgtccaccgcggcgaggcattcgatggaaacgccctcgtcgaacagctgctggtacatggtggtgcagtttttgtagcagcagaagcacgtttgggcgtcgcgctctttcgcgtataccttccagcatccgctgcacaggaaattctcgccttcgttgtcgatgaagccgatgacgtcctcgtagggatagcccaggaagaagccgatctcgtgcgggaacgagcagcgtcccgtcatctggctttgcaggtcggtgccgcagatgcgcttgtgcagcttctcgatgcaggccgacagcgacgaggggtcgtagccctcggcggtcaggaacgcggccacctgctcctgctggatggcgcgcgtgagcagccggggccggtacacgtacacgagcgccccgctcgtgcggcgggccagcacctcgatgcgcacgccgtgcggcgccagcttggcgcggcaggcgcgcagcgcgtcggacagctggtcgtcgcgcagggccgccgcggtcgggcgccgtccgtgctggacggccgtgggggagagggtgctgcggcaggtgaacaggttcgcgggtttgagcgccgcgagcgtgggggtgcagtggtgcaccagcttgcgttcgaacgcttcgcaaggcgataattcctgctcgattgcttccatgcggcctccctcgggcagcgcctccgcgggtgtcggatgcgcctataagttagctttggataacatatacccgagtgtcggaggttcgtcaagcacggatccgaaaaagcgcgagacgcgcaacgtatgcggcagcgcaggacccgcggacgttgcgctcctcgccttgcgtcgttctccccgagctgcgcaaggggtcggcatccgggcgtccgaatgtttcacgtgaaacattcgttctggtttcattcgaggcgcgaccctcgacgatccctcgatcgcctccgctcaggcgctgcggcggcggtaggcgctggggggcacgccggtgcggcggcggaaggcttcggcgaacgcgccgggcttgcggtagcccacggcgcgcgcgatgtgggcgatgggctcgtcggtggagttgagcagctcgatggcgcgctcgatgcgcgcgtccgcgacgaacgccgcgggcgaggtgccgtacgccgccttgaacgcggccttcagcttcgtctgccccatgcacgcgcggcgtgcgagctcctcgcaggacagggcgcccgcgagattgccgttgatgtgggcgctcaggtcgtcgagggccgcgcgatcctccttcgacagcgacggcgcgctcccttcggcgcgctccgcctcgatggccgccgcgcgttcgatgaccagcgcgagcgcctcggccacggcgccctcgtagaacagggtggccgccatgcccgtgccctgataggcgcgcacctgtttgaacagggcgaccagctcgggaaagtcggtgcggccgtcaaccagcgcgaaggcgcgccgcacgtcggggatgttcccgaagcgggcctgcaggtagtcgcggtagtaatcgggcgagatggtgatggaggtcgcgcgggtcgccgaacccggctggtagagcgccacgtactcagcgccttcctcggcgaggtaggtggatatggccccggcgcgcagcgtgctgccgccgctctgcacgatgaggtcggcggcttcgtagtatccgatggacaggtgctcggcgtggcggtagcgcatgacgccggcgtgctcgaacgtcatgtcgaaggcgttgacggcgaagaggttgtcgtggaagtaggcccagtattcgccgtgcccgcagccgttcgcgaaccggtagacgctgcccgccgaaccgtatcccggcaccgtgccggcgggcaccatgtcccagaggcggaacgcctcgtcgtacatgtcgtctttgatgctgcgcattcgcttcctcctccgtctgcccccgggctgccgatcgcgtgcgttccgcactgcccgaaacggtcgtttcgctgccgtgaatcgtcgcgcgcgcccgtcgtcgctgctgccgtccggctgattcgctcattataccaaaaagttaccgagggttaacaacgcgctgccggttggcggcgttcgacgggaaaggagcgtgcgcaatggcatcgaacgtggcaaacacgcagggggagagggcggcttccgcgacggcgaaccggtggacgacgcgggatgtgctcacgttcgtcatcttcaacatcgtcatcatcgtggcgacgatggtcgtgaagctggcggaggacgcggtgctctcgccgcagaacaccttcttcgtgggatcgtggctgttcccgctggtatccactccgttctacctggtcatggccgatcgcatcggcaaacgcggcgtgctgggcggctccatcctgctgttcggcgtcctgtacacgttcatgggcggcctgtactgcgcgcccgtggccgtggtgggcgccgtgatcggcgagctggtgatgtgggggaaggggtcgtaccgcagcatcgtgcgttcggccgtgggcttcttcgtgtactgggcgacgttcgcctgttacggcattatcccgtatctcctgttcaaggatgcgtacatggagcagctgggcgcgtattacagcgcgagcgacgtggccgccatggtgtcgcagtacacggagctgccgtggatcctgctcatgctggcgatgttcgccgccggtacggcgctcggcgcggtcatcggcgcgaagttcctgaagaagcacgtccgcaaagcgaagatcgcgtaagcgcccgatggagacgagctcgcaagcgcgccccttcgcgcgccccgacctgcgcgcgggcctgttcggcctcgacccgcgcacgcatctgctggccgtcgtggcgttcggcgttgcgtccatcgtgctcaccggcttgctggagacggcgttgttgcaggtggctgccgcgttgtacctggcgggcaacgggcgcgctcgcttggcgctgcgctcgtgcgcaagcttcgccgtcgtcgcgggcctcagcttcctgccgctgccggggctgtacggggtgctgttcgtgagcctgctgcacatggtgccgccgttcacggcgggctgcgcgttgttctcgctgtctccttcggctatcatgtgcgcgctcgcgcggtggcgcgtgccgcagcgcgtgctcgtgggcgtgtgcatgctgttccgcttcgcgtcggtgctctcgttcgaggcgcgctccatcgtgcgcggcatccggctgcgcggggtgttcccgcgcgcgatcgacgtggcgctgcatcccgccctcgcctacgagtgctgctacacgccgcttgtcatgcgctgtttgcgcctgtcggccgagctggccgcgtcggcggagctgcggggcatcgaggccgacggcgtgcgcacgtcggtgcatcatgtgggattcgaggcgcgcgacgcccttgccgccgtggcggtgctggccgtgtgcgcggggctgtgcgtgtgggggaaggtggcgtgatggcgcaagcgcaggacagcgagcgggcggcggccgtgctgctcgaccgggcttcgtttcgctacgtggacgaatccgagcgggggttggaagcggaagcgggttctgccgcgcccgcatcgggcagccgcgtggacgacgtgtcgctgtcggtggctcccggccgctgcctcgtgctgtgcgggcgctcgggcgacggcaagtccaccgtgttgcgcctggtggacgggttggcgggcacgttctttcccggcgatctgacgggcgtcgtggaggtgtgcggcgccgacgtgcgccggctcgcaccgcgggagcgcaccgagcgcctcggcgtggtgatgcaggacccgcgcagccagttcttcatggggacggtgggtgacgagatcgcgttttcggccgagaacctgggggtggaccccgccgaaaccgtgcgccgcgtgcatgccgccgccgagacgtgcggcgtggaagggcttctgggcgagaagctgtccgagctgtcgagcggccagaagcagcgggtggccctcgccgccgccatcgcgtgcggtccggccgtgctcgtgctggacgaacccacgtccaacctggacgcgcagggctccgaggcgctcgtgcgcatcctggccgagctcaagcgccgcggcaccgcggtggtggtatccgagcatcggctccaccagctgctgccggtggccgacgcctacgtgtgcctgcgcgccggccgcgtcgttgagcggtggagcgccgacgcgttcgcacggctcgggctggaggacgcggcggcatacggcttgcggcatccggacatggccgcgcccgcgccgggcgtcggcggcgttgcgcctgcagcgagcggttggcgggtcgaggggctgacgtaccgctacccgtccacgaagcggggcatccgcgacttcgatgccgcgttcgcctgcggggcggtgacggtgatcgagggcccgaacggggcgggcaagaccacgctcgcgaaggtgctgtgcggcgcgacgcgcgagcaggcggggcgcgtgacgttcgacggccgccccgtgccgcgccgcgagcgacggcggcgcagctacttcgtcatgcaggacgccgactaccagctgtacgccggcagcgtggccgacgaggtggtgctggggcggcgcgtggacgaggcgctgaaggcgcgcgcatgggaggcgctcgaggcgttcgacctggtcgatctggccgatcgacatcctgcgagcctgtcgggcggtcagaagcagcgcgtgacgctggcggcggcgtactgctcggacgccgacctcatcgtgctggacgagcccacgagcggcctcgacggccgcggcgtgcgcgaggtgtccgcgtggtgccgcaccctggccgccggcggcaaggccgtggcgatcatcacccacgacaacctgctggccgctctcgccggcgatgccgtcgtggagctgaaaggctaggcacccgacggggaaggcgggcgagccgattgcccgtgcgctgtcgatcgcgaaccgcgccgcaagttcgggcttgcaatccgcccggagcgcctctatactgataatcacattatcgataatgaaattatcagtagagggaaaggcggttggaagcttgtcgaaatccgacgcgagcatcgaccctcgcatcctcgacagcgcacggcgggagttcctcgcccgcggcttcgagggagcgtccttgcagagcatctgcgcggacgccggcgtgacgacgggtgcgctctacaaacgctacaaggggaaggccgatctgttcgaagccgtggtagctcccacgctcgccgacatccgcgcgcttgaggaagaggcgaagcgccgcgattacgcgctcatggacgataagaaccttcgcgagctgtgggctctgtccgaagatatccatcgccagtggatgatctacttctacgagcgctacgaagggatgcggctcctgttgtgctgtgcagagggcacggcctatgcgaacttccttcacgacttcgtggcgcgcaacacggcgttgtgcatggagttcgtgaacgaggcgcgtcggcgcgatttgccggtgagcgacatcgacgccgacgagttgcacatcctgctcacggcgtactggtccaccgtgttcgagcccctcgtccacgggttccccctggaaaaggcgctcggatactgcaagcgcatcgccgggttcttcaattggcaggtggtgttcggcttctaacatgcggtgaggaaacggaagacgaggcggacgggatccgccttttctcgaaccaaaggttaccctaatctaacatttgaaaggaaacgccatgcaacagaacgcagggcaggcgcaagccatgcccgaaaccgaggccgtgcccgcgggaaagcggccgggagcgcgcaacgagcgcctgaacgtgcgcgacttcgtgaccatcgcggtgctcaccgtgctggaactggtggtgtatttcagcatcggcatgattgcgggctcgacgcccatcggctggtgtttcacgctgggcatccaggccatcccgttgggcatcatcttcatgctgatgtacgcgaaggtgaacaagcgcggcgtcgtgctcatctcgggcgtgctcgtggggctgctcgtgggtatgagtttttggcttaccggcctcgtcatcgcattgggcgcgctggctggcgaggttatctggaacgtcgccaaccgcaagcgcttcgccaccatggccgccagcttcacgtccatcatggtgggctggtatctgggcgcgttcgccccgctcgtgctcatgaaggacttctttttgaactcggtgcccacgatggctgagttctacggcagcgtgttcgatatcgtggcgggccctctgttcttcgtctgcctgggcgttaccgcgcttggcggcgttctgggctcgctgctgggacgcgctgtgctgaagaagcacttcgaacgcgcggggatcgcctgatatggaggccgcgcgcatgcagaacgcgaccgccgtgcctcgcgacgggggatcgggcgtgccggcggtgagaaacctcgacccgcggatgaagctgcttatcgtcctcgtggtggggtcggccgcgctgttcagcccgcatcgtgccctgttgctgtggtgctatgcgattatcgcggcgctgtggctgctgtcgggcgaggcgcgtcgcgcgctgggattcgtggccgtgctcgcggcggtggcgcttgccgagtggggcgcggggttcatccccaacgccacggtggcgggcatggtgggttttctcttcttcattttcgcgcgctcgctgtctacgtttgcgctgatcatgtggatgtcggtggggttgcgcatcgatgatctcatcgcgtcgctgcagcgcttgcgcctgccgcgcggcctcgtcatcaccatcgccgtggtgtttcgctaccttcccacggctgccgacgagttccggaagatcagcgccaccatgcggctgcgcggtgtggagctctcggcgcgcaacctggtgctgcatcccggccgctcgctcgagtacgtgctggtgccgctcatcatccgcaccatcaaaatcgccgacgatctggccgcttccgccatgacgcgcggcctcgacctcgtgggtgcgcgcacgacgtaccgcgacgtgcgcatcggagcgtcgggggcgctcgtgacggcggcggtgctcgtctgtacggcggccggttatgtcgcgtgggcggtgaacgtgctatgacggccaacgaggtggtggtggcaggtgcgacgtttcgttacgcccacgatggccagcctgcgctgcgcggcctcgacctgcgcgcgggcggcgggaagctcgtgctgctgctgggcgcgagcgggtgcggtaaaaccactgcgacgcgcctgctgaacgggctggtcccccatttcttcgagggaggcgcgctcgacggctcggtggacgtgtgcggcatggagccggcttccgtcagcgtgcagcggctggccggcgcggtggggtcggtgttccaggatccgcgcagccagttcttcgccaccgacgtgtcgtccgaaatcgcgttctcgtgcgagaacctcggcgttcccgcgctcgagatgcgccgacgcgtggccgaagcggccggagcgtgcggcgtcgcgcacctgatggaccgcagcatcttcgacctgtcgagcggcgagaagcaagcggtggcggttgcgtcggtgctggcgatgcgcccgcgcgtggtggtgatggacgagccgtcggcgaacctcgacgaggtggccaccgctcggctgcgcaccatcgtcgagacgctgctgcaccgcggcgtgaccgtggtggtgtccgagcatcgggttcactatctggccgaccttgccgacgaggcgctgctgctgcgtgcagggcgcgtggagcggcgtttcgccgcgggagaattggcgcgtcttacgcccgaggcatcgcacgagctgggcttgcgcgcgtcgagcctcgacgaggtgcgcgccgtgccgcgcgcggaggcccgggggcctgcggtccttgaagtgcgcgacgtgagcttcggctatcggggcgcgccgcccgtgctgaagggaacgtcgttctcggtgcgggagggcgaggtcgtgggcatcgtcggacgcaacggcgtgggcaaaagcacgctgatcgacctcgtgtgcggtctcaagacggagtgtgcgggcacggtgtccatcggcggcgtcgcgttgcggccgaaggagcgcgtgcgggcaagctacctggtcatgcaggattcggattgccagctgttcgcggaaagcgtcgaagccgagctgcttctgggcgagcgtgccgacgaggcgcgcacggcgcgagcgcgcgcagcgcttgcgcgcatggggcttgcggggctggaggaccgtcacccggcatcgctgtcgggaggccagaagcagcggctgtccatcgcggtggcctacatgaaggatgcgaaggtcgtgtgcctcgacgagcccacgagcggcttggactgggcgtcgatgatgggcgtggcgcagctgttgcgggacctggccgaagaagggcgcggcatcgtggtgatcacccacgactacgagttcttgctggcggcgtgcgaccgggtgctgcgcatcggcgagggcgggtcggcggtcgaggtcggcttcgacggccctggcgatgcgagtgcgctccgcaaccccgaatagtcgtttcggtgccgcgatgcggcgggagtccctcgatcctgtgccggcgggcgcgcgtttcgggcattctgagcgaagtttgataaagctaacttgaggagttgaccaatggaagtttctccggcgaaccgcgacgtgcggccaagcgcgttcgcgaagctgtactacttcatgcggccggatcgcgggcgcatggtgtgctcgctcgtgctggcctgtatcggcgaggccgtgggcatggtgccttacgtggtgatcgcgctgttggcggcggggctcatcgagggcacgctgacgttcgagcgcgcggccctcctggcggccgtcgccgcgctcgcgcacgtcgcgcgcttcttctgcacgtggcgctcgtccatgatgagccaccgcatcgcgttcaaggcgctggccaccatgcgcgaccagatggcggagaagatggagcgcgttcccatgggcacgatcatcgacacgcccaccggcacgttcaagaaccgcttcgtcgacaacgtgaaccagctggaagacgccatcgcccacttcatgcccgagctgccgtcgaacgtgttcgggccgttgctggccatggtcatcgtgttcgcgctcgactggcgcatggggctggccgggctggccaccatccctctgggcgtgctgttctatgcggccatgatgcgcgattacaagccgaagatggcccgctacatcggcagcgagcagcggatgaactcgtcgctcgtggagtacgtgaacggcatccaggtgatcaaggcgttcgggcgtacggccagctcgtacggcggattctccaccgcggtcgccgagtaccacgactcgacgctcgcgtggttcaagcagagctgggtgtggatggcggccgtcaagtcggtggtgccgtgcacgctgctcgtgtcgctgccgctgggcgtgtggctcatgtccgcaggccagctgacgctgccgatattcctgacgtgcatcgtcatcccgctgggcttcatcgcgccgctgctgaagttcgcgcaggcgggcggccagatctcgcgcatggacgtgtgcctcaacgtcatctgggacttcctgggcacgcccgagctcgtgcgccccgccgagcgcgtgcggctggacggcgagtcgttcgcgttcgagaacgtgtcgttctcctaccacgagggggccgaggtgctgcacggcgtcagcttcgagacgcatcccgggcagatcacggccatcgtggggcccagcggttcgggcaaatcgaccgtggcgaagctcatggccgggttctgggatgcaacggacgggcgcgtcgcgttcgacggggtcgatgtgcggaacatcccgtaccagcagctcatggagcatatctcctacgtggcgcaggacacgttcctgttcgaccgcacgcttgccgacaacattcgcatggggcgtcctgccgcttcgcaggtcgacgtggaggccgccgcccgcgcggcgggttgccacgagttcatcagccgcttgccgcagggctacgacacgcgcgccggcgaggcgggcgagaggctgagcggcggcgagaagcagcgcatcgccatcgcacgcgccattttgaagaacgcgcccatcgtcatcctcgacgaggcgacggcctacgccgatcccgagaacgaggcgctcgtcgagcgcgccatcagcaagctcgtggtcgggaagacgctcgtcaccatcgcgcaccgcctgtccaccgtgacgggcgccgaccagatcctcgtcatggacaccggccgcatcgtcgcccgcggcacgcacgacaagctgctggaatgctgcccgctgtaccgtcgcatgtgggagcagcacagaagttccgctgttctacgaacagcggaaccggccgacgctgcggcttcccccggtggcaccggggaaaccctcgctgacgtttcgacgacgggcgacaacgatatcaaggaggcgatgtagcatgttcgcgctcatcaaacgcgtgctcgacctggctggcagcttctctccggcggcgcggcgcagcctgacgtggggcatggtgtgcaacatcctgaaagcgttcttcatggccggtatgctgggcgcggtgttctgggcgctcgagaaccgcgaccacctcgacgccgtcgtggcgctgcaatgcctgggcatcttggctgtcagcgtgatcgggcagtacgtgttccagtacctcgtggacatcacgatggacgcgcagggcttccacatcttccgcgacctgcgcctgcgcgtgggcgaccggctgaaggccgcgcccatgggctacttctccgagcagcgcctgtcggccgtcaccacgacgctgaccacgacggtgcaccagctggaggagttcatgaccatctgcctgacgggtctgacgggcggcgtggccatggcggtgatcatgagcctgttcttcctcgccgtggcctggcccatcgcggccatcacgttcgcgggcatcgccgcgggcctgtgcgtgctgaacgtgctgcgccgccgcgccaccagcgtgacgcgcgaggtgaccgccgcgcaggaggccatggctgacaaggtgatcgagtacgctcgcggcatggccgtgctgcgcacgttcgccacgcccgacgaatcgctggccgccgcgaaggcgtcgttccagcagaagcgcgcggccgattaccatcaggaggccgccgcgcagggcatcctcaagctgtacgcgctcgtgttcaacctggccagctgcgcggtgctgttcaccgcgtgcgcgctgtacctgaacggcgcgctgccgctgtcgtgggcgctcacgctgctcgtggccgcgttcatgatctacggcgagctcatccacgcgaacgatgcggcgttcctcacgaagaagatcgaaggcgagctcgaccgcgtcgacgaggtgtgcgacatcccgaagcagaacgcgacggacgcgccgctcgcgcccgccgatttcggcatcgagatgaacggcgtctcgttcggttacgacgccgaccggcgcgtcatcgacgacgtgtcgctgcgcatcccgcagggcacgagctgcgccatcgtggggcccagcggctcgggcaagacgacgctcgtgaacctcatggcccgattctgggacgtggacgccggcgcggtgctgctcgggggccaggacgtgcgcaagggcacggccgagagcctgctcgcgcacgtgtcgatggtgttccagaacgtgtatctgttcaacgacaccgtggagaacaacatcaagttcggcatgccgaacgccacccatgccgacgtggaggccgccgccaggcgcgcccgctgccacgagttcatcatgcagctgccgcagggctacgacacggtgctcgaggagggcggcgccagcctctcgggcggggagcgccagcgcatctccatcgcgcgcgccatcatgaaggatgcgcccatcgtcatcttggacgaggccacgagctcggtcgatcctgagaacgagcacgagctgatcgccgccatcggcgagctcacgcgcggcaagaccctcgtgtccatcgcgcaccgcctgaacacggtggccggcgccgatcagatcctcgtggtggacgagggccgcatcgtgcagcggggcacgcacgaccagctcatgggcgagcaggggctctaccgcgacttcgtgaacctgcgacgcgaagccgccggctggcgcctggcggggtagggcgcgcgccgtcgcgcgccgcctgcgaaatgtccgatcggagtaggcgcgcggctgtttggagcggaacgggcggcccgtttctgctataccggagggaagggaaacgcactgcgcgcgcggcggccgcccgcgcggagaggaggtgcaggtgaagcagcctgttcatgagtctgccgaagactatctgaaagccgtgttggcgctggagcgcgagcacggctacgtccgcgccgtggacgtagccggccggctgggcgtgtcgaaggcgagcgtgtcgaaggcgctgtccaagctggagcgccagaagctcgtgcacgtggtggcccacgacgtgcggctcaccgccgaggggcgcgccgtggccgagcgcgtcagcgaacgccatgcgttcttccgcgctctgctgcgcgctgcgggcgtggaggccgtcgtcgccgacgaggaggcgtgccgcctcgagcactgcctgtgcgaggactcgttccggaagctggtaaccgcgctcgacgcgcgcggctgagagcgctcggttgacgcgcggcgggtcgcccggtatgatggcggcccgggcctcatggcccgcaacccaacgaaaggctctcctctcatgactgttcctcccaaccgctaaaccacgcgacacatccgtcccatccgctgccgcgccgcgcgcggccgcttcgtgatgggcgctgcccgtccgcctgccgccgctgcgagcggccgttttgcgatgggccgtccggttgagatgcacagacaatcagagaggttccctgtatgaaaaagctgaataacggcgtggtgccgcctgtgcccaccttccatttcgaacgtattcggattgcgaaggaaggcaacaaccatcatgaaaacgagtatatggcgcgtggaggcgaccgccgcgccggtcgcgctgcgcccttgtgggacctgcggtgctgacgcggagttcgcgtccacgggcctgtttcgcgtgaacgcccagaagaaacgtctggacgtgtggctcatctaccggtgcgccacgtgcggaagcgtgtggaacagcgccgtgatcagccgtgggcgtccgggaagcatcgaccgcgaagagctcgagcggttcacgggcaacgatcccgtgatggcgctgtggtgcgcgctcgacgtcggcttgctcaggcgcaacggcgcgcgccggggcaaggtcgccttcgtcgtcgaaggcgaccggcccgccggcggcgaggactgtcgggttgaaatcgacggcggcgaccttgcgggcctgcgcctggccgaggtgctgcgggccaagttgggcgtttcgcgcagcggcttggagcgcctcgtggaggcgggcgacgtgagcgccgccgacggagccgacgtcctcgccgcgaagctccgtccgcaccagacgatcctcgtgcgcgggcggcgcgagcagtaggcgggcaggcggcccgggaccacgctcccgggccgctcccgccccctgcccccccaccgcgcccgccaccgcggacgcccggcccctttcccgatgtttcacgtgaaacattcgttctatgcgcacaggtggggtgcgaccgtgggagtgtgctatcatgacggcgaacacagcggccatgcaaaggagccatcatgtacggattgaaaaccgaggccagcttcgactcggcccacttcctgaccgattactacggcaagtgcgagaacctgcacggccaccggtggagagcggtggtgtacctcgaggtcgccgacctgcaagccgacggcacgatgaaggacatggtggttgatttcggcgtgttcaagcgcgcggtgcgcgacctggccgaagagctggaccacaccttcctcgtggaagagggctcgctggccgcgacgacgctggccgccctcgaggccgagggcttcagcctgaccgtcctgcccttccgcaccaccgccgaaaacctggcgcgctacgtctgcgaccggctgacggagcagggtttccccgtgtcccaggtggacctgtacgaaacccccaacaactgcgccatctaccggaggacggcatgaacgtttcggtcatcctggggcatccctacgacggcagcttcaacgcggccatcgcccagaccgtggtgcaaacgctggaggaggacggccatgcggtggcgttccacgatttgcacgcggagggcttcaacccggtgattcccccgtccgagctggtcagcgatgtgccggccgacgatctgacggccctgcaccaacgcgagatcaaggaggccgacggcatcgtcgtcgtgcatcccaactggtggggacagccgcccgccatcctcaagggatgggtcgaccgcgtgctgcgggagggcgtggcctacgggttcgccgagggcgattccggcggcggcctgcccatcggcctgctgaaagcccgcgcggtgctcgtgttcaacacgtcgaacacgccggaagcgcgcgagctcgaagctttcggcgatccgctgcagcggctgtggcgcgactgcatctgcgacttctgcggcgtgaccacgttcgatcgggttatgttccgcgtcgttgccgacagcacgccggccgaccgccgcacgtggcttgagcaggcgcgcaccatgacgcgcgaaagtttcccgtccgaatggaacagcgctgcccgatcggactagaaccgtctgccccgttgccgcatactgtctccgatataagtaacccttggctaacaagtaaggagaccttcatggcaagcagcgtcgcatcgacggcgagcccggcaccttccccgagcgaggggaaggtgctcaagggccgcgacctcatcaacatcggcatcttcacggccatctacttcgtcatccagttcgtgttcatgctgtgcggtggcatccatccggcgctgtgggtgttcatgccggcgctcgacgggttgttcgcgggcatcccgttcatgctcatgtgcgcgaaggtgcaaaagcccggcgccgtcgtcatcatggggctcatcgtggcgctcatctacttcgcgacgggcatgttcacgccgctcatcctggccatgatggcggcatcttgcgttgtcgccgaggtcatccgcgcggttgcgcgctaccgcagcttcctcggcaacgcggtggcgtacgcggtgttcggcctgggcatgtgcggaagccccctgccgctgtgggtgttccacgactcgttcgtctcccagatcgccgagcagggtatgggcgccgactacctggcgtcgcttgacgcgctgtccacgacgccgatgctgatcgccatgttcgccgtcaccatcgtggcgggcctcgcgggcgcgtatatcgcgcgctgcctgttcaagaagcacttcgagaaggcggggctcgtctaatgcaggccacctacgcgctcgaggatcgtcgcgtgctgggccgggcgccgcgctccggcgtgctcgacctcgacccgcgcaccatcatgggcgtgctgctggcggcgtcggtggtggccttcatgtcgaagagcctcacggttgagctgggcctcgtgctgggcgtggcgctgctgcaggcgctgacggggcacgtgaggatggcgcttgcgttcgcgggcggctacgcggtgctgtgggcggtgctcaacctcgtgttcccgcacgtcggaggcgttgcagccaccatgttcaccatcagcttcacgttctcgcgcaagatcttcctgtgcctcatggtgggctcgctgctggtggccgaatgctcggtgcaccgtctgacggccgcgctcgagcgcctgcgcgtgccgcaggtggtgctcatcccgctcacggtgaccatgcgctacttcccggcgctcaaagacgagatggcgcacatccgcgacgccatgcgcctgcgcgacatccccgcttccgagcggctggaatgcttcgtggtgccgctcatcatgtcggccaccaccacggccgacgagctgtcgcgcgccgcgacctgccggggcatcgagaacccggtgcgctctaccgacaccgagcggctgcgcatgcacgccgccgattgggcggtgctcgcggcgtccgcggcggcggtcgtggtcgtggcgctgtggggaggggcgtactgatggcggcggctcggcagtgcgctgaggcgcgcggcggcgggcgcgccgcggcgcgcggcgacgaggcgccggtcgtcgtccgcctgcgcgatgcgtcctgccgcggggccggcgacgcgctcatcctggacggcgtggacctcaccgtgcgccgtggcgaatgcgtgctgctgtgcgggcgctcgggcatgggaaagaccacggtgacgaagctgatcaacggcctcatcccgcaattcgagcccggggtcgagcgcacgggcgaggtggaggtgtgcggcttcgatccggcgcgctgcgccatgcacgagctcgcgcggcacgtgggcagcgtgttccagaacccgaaatcgcagttcttcaacctcacctccaacgatgagctggcgttcggcctggaggcggcgggggtcgacgccgacgcgatcgaggagcgcatccgggcgacggtgggggcgctgcacgtcgagcacctgctcgaccgcggcgtgacgaagatgtcgggcggcgagaagcagagcctcgtgttcgcctcggtggacgtgatggaccccgacgtgtacgtgctggacgagcccaccgcgaacctcgacgcgcgcgcgatccgcgtgctgcacgaccagatcgccgccatcctcgcgcgcggcaagacggtgatcgtcgccgagcaccggctgtacttcgtggccgatctcatcgatcgcgcggtgctcatcgaagggggccgcgtcgcgcgcgagttctcgcccgaggacttgcgcgcgctgtcggaggaggagcgcgcccgcctgggcctgcgcgcagtcgaccccgccgtcgcgatggccgtgacgtgcccggcggcccccgcgtgcgcgacgggtgcgctcgagcgcgggctgtcgctgcgcggtttcgccagcctgcgcaagaagcgacgcgtgttcgccccggtcagcttcgacgtcccgcgcggcgcggtggtgggcgtgacgggcgcgaacggcgtggggaagtcgacgctcgtgcgcgcgatggcgggcctcgagcgcgcgacggagggggagctgcgcttcgacggcgcaccgctcgatgcccgcgcgcgccgccgccggtgctcgctcgtcatgcaggacgtgaaccatcagctgttcagcgacagcgtgcgcggggagtgcgagctgtcggcgggcggcgtcgacgcggctcgcgtggacgaagtgctggcggccctcgacctggagcatctggaggcgtgccaccccatggcgctgtccggcggccagaagcagcggctggccgtggcctgcgccctgctcgccgggcgggaggtgctgctgttggacgagccgacgagcgggcttgacttcgggcatatggttgaggtaagccggttggtgaaagggctggctgaacgggacatctgcatcgtcgtggtcacgcacgactgcgaattcctcagccgcagctgcgatttcgcgtacgaattggaggcgggctgatcgatgggcgaggcgggcgatgtgctgtcgtgcgtgatggcgggtggcgaaggcgtcgtggaggagcggccgggaggggccgtgctccgtgtgaagaacgacacgggcgagggatccatggccttctgccaggtgttcgacggcgtgggactctcgttcaacgacttccggctggacgcgtacgattcggggttcgtggccggcccggacatgctgtgcatcgaccactgccgcgaggggcgcatcgagcagcccgtcgcgggcggcgcttactcctacgtggcgtccggcgacctcaagatagacgaccgctcccgccataccggcatgttcgtcctgccgctgggtcactaccgcggcatcaccgtgtccttcgacctcgcccgcgccgagcgctccatcgcccaagcgctcggcgggttcccggttgatctgcgcgcgctgcgcgatcgcttctgccgcggcggcgaccccttcatcatgcacgacgcaccgggcgcggagcacatcttctgcgagctgtactccgtgcccgacgagatccgcgcgacgtacttccagctcaaagtgctggagctgctgctgttcctgcaggtgctcgatcccggccccgtgcgcgagcgtcggccgtacttctaccgcgcgcaggtggagaaggtgaaggcggcgcgcgacttcatggtgtccgacctcaccgtcgagcacaccatcgacgagctggccgaccgcttcgatctgccgcccacggcgttcaagacctgcttcaagggggtgtacggcctgccgccgtacgcgtacctgcgcaccttccggatggagcgcgccgccgcgcttctgcgcgaaaccgacctgcgcgtggccgacatcggcctggccgtgggctacgacagcccctccaagttcaccgccgccttcaaggccgtgatcggccaaacccccaccgtccaccgccgcgaccgcgcaaggtacgtgcgatagcgcgataacaagttgctttttgactgatttgtaacttgctatttgtatgatatactcattgcgaaatacttgattgccgtcggtttcggagggatttccatgacgctcacacccacggggtatagacctcgcgttatcgatgcagaacttgcgcgttgcctcaagttgttcggtgccgtggagatacgtgggccgaagtggtgcggcaaaacatgggcaggactcaatcagagcgtcgacgaggtgtacatcgccgacccctcggatggctacgtgacgcgtcgacttgctcggctcgatccggattccgtgctgcaaggcgaccatccgctccttgtggatgagtggcaggctgcgccaggcgtatgggatgcggtacgcgcctcggtggatcgtgcgcccgagcctggtcggtatatcctcactggttcggcgcaaccgcttctcaaggacaccgtgcacagcggaaccgggcgaatcgtcagcatcgatatgcggccgatgaccctgttcgagtcgggcgactcgacggccgaagtgtcgctcgaggagcttttcgacaatcccgggaaaaagatacgagggcgctcttcccataaacttgacgacatcatcgcattggctgttcgcggtggatggccccgcgccgttggccttgatccgggggacggtgctctcatcgcgcggcgatacataaaaagcatcgtcggcggcaaggatgtggagtttgaaggcgtgcggtactcgcctgccaagcttgaggtgctgctgcgctccttatctcgcaatacggccaccatgacgagcatgtccaccattcagaaagacgtttcgagcgtcgatgcgaacggattgtcgcgatcgacagttctcgcgtacgttgattatttgcagcgcatctacatgatatgggagcagcctgcatggcggccggaattgcgttcggcaacgcgcctgcgaaccacgcccaaacgccacgttaccgacccctcccttgcggctgcaagcttgaaggcggggccgaataagctcaagagcgatttgaacacgttcgggttcgttttcgagaccatggcggcgcgcgacttgcatgtgtacgcgcagagcctggggggtcagctgtgccattaccgtgacaattcgggcttggagatcgattcgataatcgagctcgacaacgggggctatgccgctatcgaagtgaagctcggggccgatcaagaggatgaagcggctgcgaacttgattcgtttcgctagaaagatggaagcgggaggtatcgatgcccccgctttcctcgctgtggtggtgggtactggagggttcgcttacacgcgtttggacggtgtgcatgttgtgcctatcggatgtctcgcgccgtagagagaggtaagtcttagataacttcccacctgattggaacagggctggcttgatggagcggaacgtgcctgctgggagccgtatagtcaggagcgttcgcattcccaactgagaaggtggttttggtggctcctgtgacagaaacgcccgcgaaggcatcgtggctggccgtgctgctttcgtacgccggccgctgccgggggaagatggcggtctcgctgctgtgctcggtggccagcgtggcggccgggctcgtgccgttctacgcggtgtaccgcatcatcgacgaggtgatcgcccccgcgcccgacggcggtgccgtgctggcttgggtgggcgcggccgcggcgggctacgtggcgtcgaaggtgctgttcggcgcatcgacgctgctctcgcacgtgtccgcgtacaccatcctcgaatcgctgcgcgacgacgtggtggagaagctcatgaagacctccctcggcaccgcggcgtcgaaaagcatcggccagatcaaaaacgtgttcgtcgatcgcatcgagggcgtggaagtgccgctggcgcacatgatccccgagctttcgggcaacgtgctgctggcggctgccatcgcggtgtggatggcactcatcgattggcgcatcgcgcttgcgtgcctggtcaccgtgcccatcgggctggtcgtgttcgcaagcggcctgggggcgtacaacaggatgtacgccgcctacatggccgagggcaaccatgtgaacagcgtgatggtggagtacgtggagggcatccaggtgatcaaggcgttcaaccagggttcgaactcctaccagaagtacgccaacgccgtccgctcgttcaaggacttcaccctgggctggttcaaggccacctgggtcagcatgaacctcgcgttctccatcctgccgaccacgctgctgggcgtgctgcccgtcgggctggcgctgtacctggcgggagacgtcaccccggccgagctggggttggagttcgtgctggcgctggcggtggtggcgccgctcatgaagctgtcatcgttcctcaacgaggcgaaggcgatggagtacgccgtggccgacgcgagcgagtttctcgacctgcccgagctgccggagcctgcgcagcgcgcggccgtgcgcgacgagggcgtggagttggcgaacgtgtcgttctcctacgagagcggggaggaggtactccacgacgtgagcctgcgcgtgccgcgcgggtcgttctgcgcgctcgtggggccgtcgggctcgggcaagtccactctggcgcgcctgatcgcgcggcattgggatgtgggcgcgggcgccgtgcgcgtgggcggcgtggacgtgcgcgacatgccgctggaccagttgtcgcagctcgtgagcttcgtggcgcaggacaactacctgttcgactgctcgcttcgcgagaacatccgcatgggcaagcccgacgccaccgacgacgaggtgctggccgccgcgcgcgccgcttgctgcgacgacttcatcggccgcctgccgcatggctacgacacgccggccggcgaggcggggcacgcgctgtcgggcggcgagcgccagcgcatctccatcgcccgcgccatcctcaaggacgcgcccatcgtggtgctcgacgaggccacggccttcaccgacccggagaacgaggagcgcatccagcaatccatcgcccggctgacgcgcggcaagaccctgctggtcatcgcgcaccgcctgtccaccgtggcggcggccgacgacatcgcggtggtggatcacgggcgcatcgtcgcgcacggcacgcacgaccggctgcttgccgcctgcccgctctacgcgtccatgtggcaggctcacgtgtgcgcgaaggcgtggtctgccgtttcccgaaaggaggccctcgatgcttaaagcgctcaagcgcatcatcgcgtggacgggaccgtaccggcgcaacctgtacctgggctgcgtgtgctcgttcttcatgacgtgggccacggcggcccccgtgatgctggccgcgtggatgctcgcgcaggtggtggacgacgcgcgcggcgtctcgacgctcgacccgtcggcggtgtggctgtcgctggcggccatcgtcgcgtgcatcgccgcccggttcgcgttctcgtacggcaagaaccgtctgcaggagagcatcggctacgaggtggcgcccgaggtgcgcatccgcatcggcaccatcctcaagcgcgtgccgctgggctacttctcccgcatgaagacgggcgacatcctcgcgaccaccaccaccgagctgggcatgctcgagctgaacggcatgaagatgatcgacgccgtggtgaacggctacgtgtcggtggcggccgtcatcgcgtttctggccgtgatggactggcgctgcgcgctggcggcgctggcgggcgtggggctgtcggcgctcgcgctggcgggcatcaaccgacgcagccggaagctcacgccggccacgcacgaggcttccgagcgcctgtccggcgccatcgtggagttcgcgcgcgggctgggcacggcgaagtcgtacggccgcggcagctccgcgctgcagccgatgtacgcggcgtgcgcccaggcgaagaaggcccgcgtcgacgtggagttcggcttcacgccgttcaacgtggcgcacctcgtggcgctcaagctggccagcgtggccctcgtgggcttcgcggcctgggcgtgcctcggcgggacgctgccgctgtggatgttcttggccatcgccctgctctcgttcaccatcttcggcggcgtggagggcgtggccgactcggcgcacatgctgggcgacctgaacgacgtgctggaccgcctcgacaagatcgagcaggcgcgcttcatcgacgaggacgggcgcgcgctcgacctcgaccgcttcgacatcgcgttcgaggacgtggcgttctcctacgacgaaggtcccgaggcgcgcacggtgctgcacgacgtgagcttcgccatacccgagggcaccacgtgcgccatcgtgggcccgtccggctcgggcaagaccaccatcgcgaacctcatggcgcgcttctgggacgtgagcgccggcagcgtgcgggtgggcggccacgacgtgcgcgagttcacctgcgacagcctgctggcgaacttctcgatggtgttccagaacgtgtacctgttcaacgacacggtggaggcgaacatcgcgttcggctgccccggcgcctcgcacgacgaggtggtggccgccgcgaagcgcgcgtgctgccacggcttcatcgaggagctgccgcagggctacgacaccgtggtgggcgagggcggcagcagcctgtcgggcggccagaagcagcgcatctccatcgcgcgggcgctgctgaaggacgcgcccatcgtcgtcctcgacgaggccaccgccagcgtcgacccggagaacgagcagctcatccagcaggccatcggccagctgacggcgggcaagaccgtcgtggtgatcgcgcaccgcctggccacggtggaagcgtccgaccagatcctcgtggtggacggcggcacggtggcgcagcggggcacgcacgaccagctcatggccgagggcggcacgtaccgccgcttcgtggagatccgccggcgcgccgagggctggcggatcgcgagcgacgacgcggtcgctcctgcgcccgcggaggacgcgcccatgcccgcggcgtcctagcggctccgccccggccgccgcgcctcctaccgctccagtccccggcggtactcgctgggcagcaggccggtctcgcggcggaacagctcgctgaaacggctggcgcacgtgtagcccaccgcgtgcgccacctgctcgatcgacaggtcgggcatccgcagcagcccctcggactggctgatgcggcggctctgcacgtagcgcgtgagcgtggagccggtcaccgccttgaagcactccttgaactttgtggggctcatgcatgcggcccgcgcgaggtcgtccaccgtgagcgcgctcgcgcagtggtcgtcgatgtacagcgccacggcctggatgcgctcgcggtcctcgggcgcgacggcgcgtcccgacgtgtcccggcgcgctttcgtgcgctcgacgatgagccccatggcctcgaacaccttgccctcgtaatacagctggctgcgatgctcgtcgcccgggcggggccacagcccggccagcagcgcgcgcagctcgggggagtcgccgtcgtcgctcagcgaggcgaacgcgtcgcgcacgcgctcgaactgcccgtcgtactcgcgctccaggtacgcgcgcgacatctcgggccgcacctcgatggacacggccttcacgggcacgccgccgtgcacgagcccgcgccagcccccgtcgccgctgtagaatccccagatgcttttcgcccgcagccgccgatacggcgtgaactcctctcccgaaatggactcgtaccaggccacgctcaggtattcgggcagctcgaactccatgacggtgtcgtggagcagcgtgaagtcgtggatggcgatctgccagcgatcggagggtgcgaggatgtggaagctgccggacgtttcgccttcgccccggtacgagcgccacagggggcagaagccctccggcggctcatattcctcgaagccgatctgctcgagcgacggggcgtggatgatgtcgtgcgagggcgggcggtgctccatgggttctgctccttcatgcggttgctcgcggcggcgcggcggtcggccgcagggacgtgcgccgcaggggcgtgccgcgtgcgacgatcggacgcggcggtgcgacgttcggacgcgcgggcgcgcatgcgcgacgtcgtttccgcccctccgcgtatgatacaccattgttaaccgaggctatcttttccgcatgaaaatgaatcagaaggaggtctgtcatgcgttcagccatgcaatccgacaagaaggggctcaccgcccgcgacctggtgacgtgcggcgtgttcatcgccctgtacttcgtgttcatgatggtgggcagcatgctgttcgccccgaaccccgtgctgacgttcctcatgccggcgggtgcggccctgctcaccggccccatctacctgctgctggtggcgaaggtgcccaagcacggccccatcatcatcctgggcgtggtggaggggctcatcatgttcgtgacgggcatgtactggctgtgggcggtagcgctcgtcgtgctgggcgtggtggccgacctcatcgccggcgcgggccggttccgcaacaagaacctcaacctcgtgagcttcctcgtgttctcgctcaaccccatggggtcctacctcatgctgtggatcgatccgtcgggctacacctcctacctggccgggaagggcaccgagcaggcgtacctcgacacgatggtgtccacgggcgcgggctgggtgctgccgggcatgatcgcgctgacgctggtgtgcgccctggtgagcgcgctggtgggtcgccgtctgctgaagaagcagttcgagaaggcgggcgtcaccgcatgatcgatcgcgcgttccggcccgatccgcgggccaagcttgcgctgcttctgctgtgggccgtcgcggtgttcctgtcgcccgggctgtggttcgaggcgctcctgatgctgctgagcgtggcgctgggcatcgcgctggggaaggggcggctcgcgctgggcatgctggggctgtacgcggtgatgatggcgtgcatgctggccacggcgcagctggacaccggcgtgctgaaaacgatgctgtcgtcgttcttcatgctggtgcgcaaggtgttcccgtgcgggcttctggcggccgtcatcgtgtccacgacgcacgtgaacgagttcatgagcgcgttctcgcgcatgcgcgtgccacgccaggtgaccatcccgctggccgtgatgctgcgctacgtgccggccatccgcgaggactggcgcttcatctcggacgccatgcgcatgcgcggcgtgaacgccagcctggccggattcctgcgtcgaccgggcatgacggtggagtgcctgtacgtgccgctcatgatgagcgcgtcgaacgtggccgacgagctgtcgatggcctcggtggcgcgcggcatcgagaacccggcgcagcgcacgtgctacacgcatatcgagttccgcgcgtccgacgggctgctggtggccgccggcgtggccgtggtcgtggcggcgcttgcgtgcagcctgttgggcgtggggaagtgaggtcgagacgatgatcgagtttgacgatgtgagcttcgcgtaccgcgcgcctgcggaaggcgcgggcgcgcccgagggggtgcgcggcatcgacctgcgcgtggaggcgggccggtgcgtgctcgtgtgcggcgcgtccggctgcggcaagaccacggtgacgaggctggcgaacgggttggcgccctcgttcttcccggggacgctcgagggacgcgtgctggtggacgggcgcgacgtggccgacctcgaaagctgggaggtggccgcatgcgtgggctcggtgttccagaacccgcgcacgcagttcttcaacgtggattccacgggcgaggtggcgttttcgctggagagcatggcgtggcccgaggagcgcatacgcgagcgcacgcacgataccatccgccagctggggttggaggagctggccgaccgcagcatcttttcgctgtcgggcggcgagaagcagcgcatcgcgtacgccagctcgtgggcgccccatccggcgaacctcgtgctggacgagccgacgtcgaacttggacgaagcggccatcgcggcgctgcggcgctacctgctggacgcgaaggcgcagggcgcggccgtgctcgtggccgagcatcgcctgtggtggctggccgacgtggccgacgaggtggtggtcatggaggaggggcgcatcgcgcggcgcttcgacggcgcgacgtttcgggcgctgccgtcgtcggaggtgcgcgacctggggctgcgggtgcgcgctttggccgacgagcgggcgcgcgagcggcgggcgccgggcgatgcgcgcgagccgcgggcgcccctcgtgcgcctgcgcggcgtgcacgcctcgtacggcaagcgcgaggtgctgcacggcgtcgacctcgacctgcgcgagggcgaagtggcggcgctcgtgggcgccaacggcgcggggaagtccaccctgtgccgcaccatcgtggggctgcatcgggaaagcgcgggcacgacgacgatcgacggtgaacccgcagggcccaagcaacgcctgcgcgcctgctcgatggtgttccaggacgtgaactaccagctgttcgccgacagcgtgcgcaccgaagtgagcttcgggctgacggacgctgaggcgcccgacgccgcgcgcgtggacgaggtgctcgacggcctggggctggcggcgtacgccgagcgccaccccgccacgctgtcgggcggccagaagcagcgcctcgccgtggcggcctgcatcgccaccggcaagcgcctcctcgtgttcgacgagcccacgagcgggctcgacctgggcagcatgcgcacggtggcggcgctcgtgcgccggttggccgacgagggccgcgccgtgctcgtggtcacccatgacctggagttcatcggccaagcctgcgacaaggccgttcgcgtggaagccggccgcatagccgccgaagccgtcgtggagggcgacctgcaagcggtgagagagctgttggcgaaggggtgatacgagggttgccgagggagcgcggcgctttgccccccccccgctttcctgtgcttcttatgccgtccagctgcgggctttttcctgttcggcgatggcgtgggcgtaccagccgccctgcgcgagcagctcgtcgtgggtgccccgctcgcgtacgcgaccgtcgtccagcaccagtatctgatcggcgcgctccacggtgtccaggcggtgggcgatgacgatgacggtcttgtccgccatgagcacgtcgagcgcccggttgatctcgtgctcgttgtcggcgtccaggctcgaggtcgactcgtccaacagcacgatgggagcgttcttgatgagcgctcgcgcgatggagatgcgctgcttctcgccgccggaaagcgtggaaccgccttcgcccaccagggtgtcgtagccctgcggcagcgcctcgatgaagtcgtggcagtgcgcggcgcgggcggccgcttccacttcctcctgcgtcgcatccggcttgcccacgcggatgttgttcgccacggtatcggcgagcaggtacacgtcttggaacacgacggccacctgctcggccagcgcgtcgggcgcgatatcgcgcacctcgtgcccgcctacgcgcacgctgccgctgctcgcatcccagaaccgcgagatcaagctgatgacggtggtcttcccgctgcccgaaggcccgacgagcgcggtgcgcgtcccgggctgcgccgtgaacgtcaccccgtgcagcacctccttgccgtcggcgtatccgaaccgcacatcgtcgaaccgcacgtcgaagctcgtgaaacgggggttgccgtcgcggtacgcaagggggcgttcggcctgtattcgctcgatgccctccgccgctttggccaggtagttcagctcggggtagatcacgccgagcgtggtcatcatgctggagatggatacggcgatcatgaccgccgcgatgaggcggggcgcgtcgagctggccgtccatgaacatgagcgtgcccgccacgagcccgagcggaacgatgagcgaggtggccacggagaacagcaccgagaacggcatgatggacagctccatgcgaatggattcgcgcttcaaatcggcgaagctgcggtcgagccgctcgaagcgccggccggtgagattgtagagcttgaacgtcttgatgccgttgatgtactcgatgatgcgggatatgaccgcgtggacgctttcgcgatagcggacgccgcccttgcttgccgcgcgcccgcccaggcgcgcaagcggcagggaggcgacgacgatcgcgaggatgatcagcccgtagagccagttgatggcgaaggcgaacgcgcatgcgagcacgctgaagcagacgaccttgaagaagctcgccagcgaggtggtgatggtctgctcgaagtcgctcacgtcggtggtgagaaccgatgcgagctggccgatgctgttcttgtcgaagtaccccaggttcagcctgcgcaggtggttgccgatcgagagtctcaggtcggcggtgatgtccgcgccccggaactgcgtttgggcgtagttcgtcgcgtacagcgcggcgcgcacgacgaacagcacgacgagcgcgccgctgtagaacgcaagcagctcggcgttgaacgcgccggcgacgaggttgatgatggctgcgatcatgacggcgaacatgcccatgtgcaaaagcgagtccgcgcaggaaagcgcgatgggcagcacgagggtcttggctttgtcgcccgctacggttcggacggttttgatgagcgttatcatgccagcgactccttcttctccgtgcggtgcgtgtaggcgtcccacatgcgggcgtaggcgccgtcttgcttgatcagggaatcgtgcgttcctcgttctcgcaggcggccgtggtcgaacacgcatatctggtccgcatgcacgatggtgtgcaggcggtgggcgatcatgatgcaggtcttgttcgtcagcaggtgcgagagcgcaagctggatccggtgctcgttctcgatgtcggtgaagctggtggcttcgtcgaacacgatgatgggcgcatccttcaagatggcgcgagcgatgcacacgcgctgccgctcgccgccggacagcttgacgccgttctctcccagcaacgtgtcgtagccgttcggcaggccctcgatcgtgtcgtggatctgcgcggcccgcgcggcggcctccacctgctcgcgcgtggcgttcggtcggccgagcctgatgttctcgtacagggtgtcgtcgagcatgaaggcttcttggaacacgaaggacaccagatccatgaggttgtcggtgcgcagttcggacagggcatgcccgtcgatgcgcaccgcgccttggcgcgtttcccagaacttggggatgagctgggctgcggtcgtcttgccggcgcccgaggggcccacgaacgcggtcaggctgccggcgggcagatcgaggctgacgtcggtgagcgcgttggtctcggcggcgccgtagccgaacgtgacgtgatcgaacgccaccgcgtgcggtttcgccggatcgagcgcgagcgtgccttcggaagcctcgggcaggtccatgatgtcctgtatgcgctccatgccgctcatgatctggttgaacgtcatggcgaacgtgagcaggttcaggaggttggacaggaacaccatgctcatgatcatgaagaacaggtagtcggcggccgaaagggagccctgcaggtacagcacgccgcccaaaggcagcacgaacaggatgccgctttccacgatggccacgaacacgccgtaggagtagccctggctcttggtgcactgcttccagaactcgttgtactcggtgacggcgtcggcgtactcgcggtagcctttcgcgtccagacggtaggccttcatcacgggcatgccgttgatgaactgcatgatggccgcattgagcttggcgagcagccggtggtacgtgggcatctgcttgccggtggccgccatggcgaacagctgcacggcaacgcccagcaccacggggaccagcatgcccagagccatgggcacgttcaaggtgagcaggtagcagaacatgatggcgggcgtgcaggcggcggcgacgatgtcggggatctggtgggcgagaaacttctcgatgcgctcgacgtcctcgatgatcacctttttgagagcgcccgaggtcgtttgatcgaagaacccgaggttgaccttcgcgatgtgccggctgatctgcgcacgcacctggtacagggtgttgaaggccccgatgtgcgagcacgcgcccgaggcgatggcgaacgcgaacttgcccacgatggccacggcggcgatgatgccgtactggagcgccgcgcccgcgtcggcgttcccctcgatgaggaacagcagcacctggtacaccatgacgaacggcacgaaggagcacagggcgctcatcacgctgaacagcgcagacagcgccagatgaaggcggtagcgtcctgccaggtggagcaggtaggccatgccggagcgccgcttggcgggttgctcggcttcggggcgtttctgggtgcgggcgttctcttccgggtgcatggtcgcaccccctttctcgatggggtaggggcgttggaatcggatggcgcggtcaccgcatggcggcgagcagctcttcggcgtcgcggagggggacgtcctgcgcgacccgcccgtcgcgcaggtgcaggacgcggtcgcacgtggcaaccgcgcactccacgtcgtgcgtgatcatgaggatgacgcggccctcgtgcgcgagcttctcgatctgcctgccgacggagcgcatgctctttccgtccaaaccgctcgtgggctcgtcgagcacgatgacggaggcgtcgtgcatgagcgcgacgcccagggcgagccgctgcttctgccctcccgaaagcgttgccgggtggcggtcggcaagcgcgcccaggcccagcgcatcgagcacctcgtcggcgcgggccgtccgctcgggcgttgccttctgcccgcacagcagctcgtcgcgcacgctttcgccgaacagctggctgtccagatcctgcatgatgtaccatatgcgtcctcggcgccgtccggacgcgagcttcttcccctccacgcgcacggtgccgccgtcctctttcacgaggccggcgagcagctttcccagcgtgctcttcccggtggcattggggcccaccacggcgacgatctcgccggggcggcaggcgaagctcacaccgtcggccacgatccgctcgccgaaggacttgcgcagcccctcgacttcgagcagcggcggcacgtgcggggccgcgcaggtccgtttcctggcaggtgcggtcaggccctcgaggttcgcgctgcgcagcccgagggcctcgatgcgcgcggggtcgagggcgacgagttccgcaggcgtgaacgagtcggcgatgcggccgttggcgaggtagacgatgcggtcggcgatgccgcgcagatagtacaggcgatgctcggccaggagcacggtctttccctgctgcttgagcgcgcgtatcaggttgccgagctgctcggtggcctcgtggtcgaggttggcggagggctcgtccatgacgtagaggggcgggtcgatggccttcgcggaggcgatggccacgcgctggcgcatgccgtacgacagcaggcgcaccttctcctcgagcaagggggcgatgtccagctcgcttgccgccccgtgcacgcgctcgacgatcagctcgtgatcgagcccgtagttctcgcacccgaacgcgatctcgcccgccacctcgttcgcgaagaactggctgcgggggtcttggaacacgttgcccgccgcgagcccgcgttcccacgaagggatgtcgtcgacctcgcgcccgaacaggcgcaccgtcccggtcagctcgccttcgtagaaggacggcaccaggccgttgaccacgcgggtcagcgtgctcttgcctccgcccgagggcccggtgagcaccaccacctcgccgggttggacggtcaggttcacgtcctcgagctggggagcggagccttcgtaggcgaaggtcaggtgcgcgagttcgatggccggcgcctgcgggtcgtggttcggcatcatgtcgctcaccccaccacgatcaagatcgaggcgatcgcgaaccccgccatgagcgctccgtcgccgatccgcatgccgtgcgcatagtagctctgcttcgcgcaggggctctcgatgccgcgcacgatgcaggatgaagccagctcgtcggcgatggtgagcgagcggaacaccatgggcaccacgccgaactcgagcgttgcgagcggatgcgccaagacgtgcgccggcgagcggaggaagccgcgggtgcgcatggcgtcgcgcacgtcggccagctcggacagcatggtgggcatgaagcgcaggatgacgatgacggcgagcagcacgggggaggggatgggcagctggcgcaagcttgccatcagctttcccgagggagcttgcacgagcaggtacaccggcatgaggaggggtagcatctccaggacgaaggtgaacgccatgggcgaggggaacccgatgtcgaaacgcacgttgagggcgagccatgcgtgcgtcaccgcgaacgcgagcagaaacccggcgccggcccttgcgaagcccatcgcggccatgagcacgaaaagggcacaggtgaacgcgacgtgcagcatcgtgctggtggacaggaaggtcacggcgcacgtgcacacgatgatcgcgagcaacgagaggacgttgacctcgcggatgcgggcgtgctgccgggttgccccgtcccgacgggtcggcgcgctcagagcggcctcggctggcgcggcagggtgcacggcgccgctcatttcacgatacccgccttcttgaagtgcttcctgagcaggcggttgccgaacaggcatccaagcacggccagcacggcggtgatggcgcaggcgcccagcaggtgcagcgggttcgacagcaggtcgagctgcatggtcagaaccggggcggtgaagccgtcggtcgtcgctttcgccacgtaggcgtcccacgcagcccagacgggcacggcattgccgatgaccatgccgaccgcccagatggtccagccgacggtgttgcgcacggggctgcggtacgcatccttgccgatcatggccagctcgcagatcgccgcgacgccggcgaagtagggaagcaggaacacgtagcctgaaagcgcgagcaccgtgccgtacacgatgccccacacgaggaagacgccatgcttgttcaggcgattcgccacgacgaggtagaacgtcgcgcagaggaacatctggatgccggcgcacaggtacagatacacgaacgggaacggcatggtcaggggtcccgtgaccatgcatacgaggaacgtcagcaccatcatggccgcgacggtcatgacgtcgcgggttgcgatgctcttcttggaggcgcgcccgcgtgcgcctcgggtggtgtcgatggttttctcggtgctcatgctgctctcctttcgggtgggcccgtcgggccgggctggtggaaatcgggcgcacgaaggaaggcccgtcgtgcgcgggtgttcgagcggactgcttttgttagtttgagctaactagtggtcatggaaagacggcatcacccgccgaagaggttctcccagccggggcggaagaagtcgacgatgagtttgatgcgcgcaacggcgtcctctttcgaggtgtcgtggcgaacgatttcgaagaatgcgtagtattccgcgctcacgagcgcatggaggtcgtcgtgggacgggctcgcgcaggcaaggccgcgctcgcgcatggcgtccaggtaggcgagcgattggctgacttcttcctctacgagatcgtcgaggaaatgctcgtagccgcttcccgccgcgtggtttatcagcaggtcgaacggctccttgtgctcgaagatgtagtcgacgatgcgggtgatcacgtcttcggaggtgctccacatgtcttcggggcgcccttcgtccagctgctcgaacccctggtcgttgcccgtgcggaagagcccgagcaggtgcgcggatacgggctcgaccagcgcggcgaacagcgcgcttttgttcgggaagcgcacgtacagcgcgccggtggtcacgccggcgttctgcgcgatgctgcgcaggctcgccttctcgtatcccttgtccagaaactctcgctgcgcgctttgcagcacgagaccgcgcgtttcctcaacctgcttcacatcctgatcccttctcatcaataacaatgttatcgataacgacgttacgaataatgtcatacacggttaactctgtcaaggaaaagatgggcgatcgtcctcgaatcgcggcgtctccgttgccggtgacggaacgcttcggtacgacgatcggacggcggttgagttgcatcggacgcgcgaagttgcagtgggcaaacttccttttcgcgtgttctatccttgcagccgaacgatatgtcacaggtgcaaggagtctgcatgaacagtccgatcagattgatattgaagtgggcgggacccgaccggaagtacttgatcgcggccgtcgtgttcgcgttcgtttcggggcttatggccatggtgccgtactacggcgtgtacgagatcatgaaggcggcctacgaagggacctgcacgtgggaggtcatcacgtcgaacgcgctcgtcgtagcggtgggcgtgtgcatccagtacgcgtgcttcggatgcgcgggcgcgctgtcgcacaagggcgcgtacaacacgctgttccgcgtgcggtgccgcgtcgtggaccatctggcgcacgcgccgctcgggcagctcgacgagcggtcgaccggctccatcaaaaccgtcctgtcggacgacatcgagaagctcgagctgttcctggcccacaacatcaccgaggcgatcatgtacctgaccggccccgtcgcggcgttcatcttcctgtgctcggtgaacgtgccgctggcgctggcgacgctcgtgccgttcgcggcggcgttcgtcgtgatgggcgtcatcttcaagcgcatggccggcgtgatgccgcgcgcgagcgcggcgttgtcgcggatgaatgcggtgatggtggagtacgtgcgcggcatgcgcgtcatcaaggcgctgaacatgggctcgaagtcgtttcgccgcttccagtccgccgtggacgaggagcacgccgtgtggtgcgacatcgcgcggaaaacgggtccgggcttcgcggcgttcgtcatcatcatcgagtgcggcatgctcgtgatggtgccgctcggcggcttcctgttctccacgggagccatctcgggcagcacgtttctgctgttcgcgttcgtcgggtcgctctacctgaccgaaattcgcctgcttcaggaaatcggcagcaagttcgcccaggtgaaaagcggggcgatcaaggcgcaagagctgctggacctgcccgccttcgccggcggcgcgccgtttcccgccaagagcgacgtgcggctcgagaacgtgcgcttcagctacgacggcacgcgcgaggtgctgcacggcgtgaacctcgccgtgcagcagggcgagcgcctggccgtggtggggcccagcggcgcggggaagaccaccatcgtcgagctcgtgtcccgcttctacgatgcgaccgagggcacggtgcgtatcggtggcgtggacgtgcgcgacctcgattacgacgacctgctggcgcacgtggccgtggtgttccagaagacgttcctcacgagcggcagcatcctcgagaacatccggatgggcaagcgcgccacgctggacgaggtgcgcgaagcggcgcggcaggcgcgcatcgacgacttcatcatggggctcccccgcgactacgacaccgagatcggcacgctgggcgagcgcctgtcgggcgggcagcgccagcgcatcgccatcgcccgcgccatcctcaaggacgcgcccgtgctcatcctcgacgaggccaccagcgcggccgaccccgagaaccaggtgcagatcgacgaggccatcgccaacctctgcgcgggccgcacggtggtcatcgtggcgcatcgcctgggcgtggtgcgcacctgcgaccgcgtggccgtggtggaggacggcggcatctcggccgtggggacgcacgacgaggtgcttgccgcgtgcccgtactaccgcaaggcatgggcggactacgagcggacgcgccgcatcacgttcgggttcggcgccgcggcggcggaagcggagccgcggcagcgcgccgcaagcgattccgtccaccgtgccgccgcgcagccgcagggcgcatcgtcggcgcccgcgcaagcgccctcgagcccgaccctggatccggccccggccccggcctccgcctccgcctcgacctcggtgttcgcgaagaaccgcgacttctccgtctcggtggcgtgcaccgtcatcgagggactgctgtcgggctgcaacttcggcctcatcttcctggtgatgcagcaggtgttcagcggcgcggccgacttcggcaccctgctgggattcaccggcgcccttgcgctcgtgttcgtgctgcggctcctcatctacggctacggctacgtgcgcgggcagatcggcggggcgcaggtcagccgcaacctgcgccagtacctgggcgacaagatcaagcgcatccccctcgcgcggttcaccgagcggtcgagcggcgactacctcaacgcgctcaccgcgaacgtgaacgattacgagcagatcctcacccaccgcaccggatccgtcgtcaaagacatcacgctggccgtgatgctcaccggcttcgtctgctggctctacctgccggccggcgcggtcgtggcgctctcgttcgcgctcatcgtgcccgcgatggcgctgtcgtggcaccaggtgcgacgctacggcacccgcaaaagcgacatctgcgccgcgaacacgagccgcaccgtcgagcacgtgaccggcatgcagacgctgcgcgcctacggcatcggcggcgtgaagaacgaggccatcgtggacagcatgcgggagtactcggacgtcagcttctggtacgaggcggccctcatccccctcggcgcggtcatgtccatcatcgtggggctgtgccagccgctgctgttcctcatgtgcggcgcggcgtacctcgacggggcgctgggcgcggttccgtacctgctgatcatcatgctgccgctgttcatgaacaaggtgtggaacagcatcttcgtgaacctgacggcctacaagaacctcatgatcgcgaagcgccgcatccaggcggtggtggacgagccggaggaggcgggcagcttcgacgcgctgccggcgacgggatcgcgcatcgagttggccgacgtcgggttcgcctactgcaagggcgagccggtgttcgaggggctgcgcctgacgtgcgaagacggcaagctgaccgcgctcgtgggcgactcggggtgcgggaagtccacggcgctcaacctcatcgcccagtactaccggcccgcgcgcggcacggtgcgcatcggcggcgcggacaccgcggcctacgcgccggaaagcgtgctggcgggcgtgtccgtcgtcgatcagaacgtgttcctgttcgacgattcggtgatggacaacatccgctacgcccggcccggcgccaccgacgacgaggtgcgggaggcgtgccgtctcgcgaacgccgacgggttcgtgcgcgccctgcccgaaggctacgcctcgcgcatcggggagaacggcggccggctgtcgggcggcgagcgccagcgcctgtccatcgcgcgcgccatcctgcgcgacgcgcccatcgtgctgctggacgaggcgacggcctcgctcgacatcgagaacgagctggccgtgaaggaggccatcgccaacctgctggcgaagcgcaagaccgtggtgatggtggcgcacacgctggccatcgtgcgcggggccgattcgatcgcggtcgtcggcgacggccgcgtgctcgagcagggcacgcacgacgagctggtggccgcgggcggcaagtacgcccgcatgtgggcggccgatcgcgagctggcgtgatgccgcccgcttcccgccccgcgggagtcgcgctgaacggaaccgctcacctgcggtaacgagcgggcaacagcccttgacgcgcgttcctcccctctgcaaagcttgcccgactggatgggcgctccggcgccgtggacgagggcgcaggcgagcgaggacggagcaggcgatggcgaacgacgggcaggcggaggaggggagcgtctccggcggcggccggcaacccgccgcgggcggcggctgtccgacggctctcccggcttccgatccgccgctgtcgcggcgctcggtcgccgccgtgttcgcggggcttctggtggcgatgaccgtggggaccctgaaccagaccatcgtggccaccgtcctgcccaccatcgtgggcgagctgggcggcgtgaaccgcatgctgtgggtgaccacgtcctacgtgctggccgccaccgtcaccatgccgttgtacggcaagatgggcgacctcatcggccgcaaagggctgttcatcggcgcgctggccctgttcgtggcgggctcggccgcgtgcgcgctggccccgtcgatggaagggctcgtgatcggccgcgccgtgcagggcttgggcggcggcgggctcatggtgctctcgcaggccatcgtggccgacgtggtgccgccgcgccgccgcgcgctctacctcagcatcatgggcgtggcctacgccgtgcccatgctggccggcccgttgctgggcggattcttcgccgacgcggtgggctggcgctgggcgttctggttcgacgtgccgctcgcgctggccgccatcgtcatcgccgccgtcttcctgccgaaaccgcgccgcaccgcggagagggcgccgttcgacgtcggcggcgccgtgacgctcgtggccgccgtgaccgcgctcacgctggcaaccttgtggggcggcaacgagcacgcgtggacctcgccgaccatcatcggcctgctggttgccaccgcggttgcgagcgcgctgttcgtgctggcggagcgccgcgcacgggaaccgctcatggcgttgtcgctgttcaagaacaggaacttcgacatctccatcgtcgcaagctccatcacgatgttcgtcatgatcggcgtgctcacgtacctgcccacgtacttccagatcgtcgacgacctgaacgccaccgccgccggctacctggtggcgcctatgaacgcggcctggttcgccgcctcgctgctgtcgggctacctcgtgaacaagctgggcacgtacaagaagctcatggtggtcagcttcgccgtgctcgtggcgggcatggtcgggttcattgccgtggaccaggacccgtcggcggtcgtcgtcggcggcctgctggccgtcatgggcttcggcgtgggcctgaacttcgagatcctcgtgctggtggtgcagaacgagttcccggcctccgccgtgggcatggccacggcggcgacgggcttcttccgcaaggtggggtcggtgctgggaacctccgtcgtgggcgcgctgttcacgagcggcctcgcgcgcgccctggccgagcgcctcgcgccggtcggcggcgtcggggcgctcggcacggacgcgaactcgctcacgccggccatcgtgcacgcgctgcccccggacgtgcgccatgcggtgggcgccgcctacagcgacgcgctcgcgcccgtgctctggctcgcgttgccgctggccgtggcgggcctcgtgctcatgctgttcctgcgcgagacgcggctggccaccaccgtggacggatcggggcatggggccgacgaaggcgcggacgacccccggcggcggcagggcgcgcgacgccgctagcccgcgcggccggcgcgggcgtcaacctacgctcacaggtcaaggttgtggttgctcctgtggcttgggggggggggtatactacttttatgagcgaactgttttttgatacgatcgacgaatccgaaatccccgcagggatggcccgcgtgcgatacgaggcgggcgcggtcgagccgctgtacgccaacgacgagttcttcagcctgctgggctaccagcgtcgatcccccgacgatttctaccccctcgacgtgcggaactcgcacggttggcgcgcgttctgcggccagctgcgcgcgcatatcgaggcaggcgagacggacttcgagatcgaggtgaaccaggagacggcaaccggcacgctgctgtggacgatggcgcggtgccgtcacgacgcgcggcgcggcacggtcacctgcctcgtgctggacgtcagctcgtggatggacacctccgagcgcctgcgcatgagcgaggacgcgtttcgcatcgccgcgcagatgagcggcaagaacatcgccacgttcgacctggccgaccgcgcgctcaccatgcagggcgcggtggagggctacctgacggcgcccgcgcgcatggtgaacgtgcccgacagcgccatcgccgccggcatgatcgcgcctgagcacgtggagctgtaccggtcgctgtaccgcgacatggagacgggcgtgccgcgcgggggcgtcatgctgcgcatgcgggacttcgacacgcggcggttccgctggtaccaggtcgattactcgctcgtgttcgacggcgagaaccgtccggtgtacgccgtcgtcgcgttcggcgacaccaccgagcggcacgagcgcgagctggtgcaaaaggcgcgggccgagcgcgacgcgctcacgggcgtgctgaaccgcgcgacgttcgaggacggttgcacgcgcatcatcgagcggtccgaagtcgaccacgggcacgcgctcatcatggccgacctcgaccgcttcaagacgacgaacgaccgctacggccacgtggcgggcgaccgcgtgatcgtggagtcggtggcgggcgtggtcagcgcggtgcgcgacgacgacctcgtgggacgcgtgggcggcgacgagttcatggtgtgcctgcggggcatctcgtcgcacctcatggtggaggccgtcgcgcaacgcatgtgcgcggcggtgcgcgaggccgccgaggcctccgacgacgaccacgggccggtgtccatcagcctgggcatcgccctgtatccgcaggacggcgtcacgtacgaagagctgtaccgcaaggccgacaaggccctgtactgcgccaagcgcgcgggcggcggcacctacgcgttctaccgcgacgagccggcggcgtcctagcgcccggcgctactcccagcccggcttccccacgccgccctgctcgatggtgtcgagcagcccttggcggtcgaacacgcccaccttgcggtagatgttgctcacgtggtgcttcgcggtgccctgcgcgatggacagctcgtcgcagatatagcgcacggtgcgtccgcgggccagcagcacgagcacctcggcctcgcggttcgtcaggcggcacatccgcgcgatggcggcgcacttctgctcgaggctggcgtcggcggtttcctcgcgcgaggtggcgtagagcttctgcacgtcggtttgcgtgaagaacagcatgcccaccagcacgagcgccagcacgcccacgaggaacacctcggagcgcagcgcctccgaccacagcgccgcgttcagcagctggtccgcggcgaacgacccgatgagcgtgccggtgcgggcgcagaggatgaccaggccgaacgacagcgccacgggtatgcgtccgcgaaacgccacgtcggtggacaccagcatcatgaacatgtcgaggcagtacacgcccatgatgaccagccccgcgcccaggaagcggtacggcgcgggcagcagcagaagcaggatgagccccgccaccatcgcggggatgaccgggcggtacagcgcgatgggctcggcggccgagggcgccaccaccatcgacagcgtgatggcggccagcgcgcagcccgccagcagcagcgccttcgcggtgaacgcggcatcgccctcggcgaacgtgttcaccatgccctgcgaggccccgtacacgatgctgatcacgaggatgcaggcgaaaatgcgccccacggggatggtgcgcacgtcgagcggcagcaccgagggctcgcggcgctgctcgcgcttgcaggccaccagcaccgcggctgacacgatgggcagcgccgccgtgaacgccacggccgccgcctcgggcagcgcgtacgcgacgaagaacagcacgaacgcgaacgtgtacgacacgtacaggtgccgcccgacgcgcccggtggccagcgcgctccacagctcgccccacatgatgagcagcagcgcgttgcccagcgacagcgacacggtgccggcaaggaaccaagcgaaccccgcggctcctgagcccagcgtcagcgcgatgggcagcgtcacggtgcccgcggcggtcaggccgcccgcagcgaggaagcttgcgcgatgcgtgaggaacggcgagaggcgccgcgcgagcgccaccaccacgaggtagcccacggtggtcagcacgagcacccacagcgtggtgttgcccgcgaacgggaagcggtcggtggtgggcagcagcacgtcggtgcacatgctgatcatccaccaggcttgccagaatcccaaacccagcaagcgccagccggagaagccaacgtggtcgtcatcctgcggtttcgtgcgcatcgctccccattcccatccctcgtcgcgtcgcttcaaacctagcaaaacaggcgggggagcgcaagcgggaaccctggttgaggcatgggccgcaacggcccatgttgcgggtttcggcgaaaatgggccgcttcgccagatgcccgcgcgcggccgttcggccaggatggggctatgcggaacaagggattccgctcatcgagggaaggggtttccaatgaccgacatcatgaagaacgggctgtcccgccgtgcgttcctgggcctgggcgccaccgcggccgtcgccgccggcgcgggcctggccggctgctcgcccgcggcgagcgcaggcgacgcgaaggccggcggcgacgcggccggaagcgcggcggcgagcgcgggcgagacgcagtacgcgtgggaggcagttcccgatcccatcaccgacatcacgtcgacggtggacaccgacatcctcgtcatcggcgccggtttggccggctgcgcgtgcgccgcggcggcggccgagaagggcggcaaggtgaccgtcgtcgagaagacgtccagctggaacggccgcggcggcggcttcggcgccatcaactcgcactacatggacgagctgggcatcgaggtggacaaggtgaacgccaagcagcactggatcgcccagtgcgcgagccgcgcgaacgaggacctcatcgtgaagttcttcaacagctccgaagaggcgtccaactggctgctggccaaggccgaggccgtgggcggctccgcgatggtgggcgcgttctacagccacgacgacgtgtacgccgagcagccgggttaccacatgctcatgatccccgaggaggccggcctcacctcgacgggcttcgccggcgccgagctgtgctacaacgatgctgtgaaggacggcgcggaattcgtgttcgattcgccggcagtgcagctggtgaaggacggctcgaaggtgaccggctgcatctgcgagggcaaggacggctacgtgcagtacaacgccagcaagggcgtggtgctgtgcacgggcgacatcggcggcgacctcgagatgtgcaaggcgtacgcccccatctgcgccgagtacggccagccgcgcagtcagtacacgcccgtgggcgtgaatacgggcgacggccacaagatgggcatgtgggttggcgcgcagctgcaggacctgccgctgcccacgatgatgcacccgcaggcgttctgctggttccacggcccgttcttgttcgtcaacgacaacggcgagcgcttcatgtgcgaggacacctgggtgcagggcaagtcgctggccatcaaccgccagccgaacggcgaggcgtggtccatcttcgacgccaactggaagaccgacctcgtgaacggcctgccctacggcggcggcatgttctgggactcgttccgcccctacggcagcgacctggagctggcgccccagtacttcgagacgcagattcccgagtacatcaaggccggcaacgcctatcaggccgacacgctcgatgagctggcgaagcagatcggctgcgacgccgccacgttcaaggccacggtggagcgctacaacggcatgtgcgaggcgggcgaggacaccgattactacaagaagcccgtgttcctgacgccggtgaaagaggggccgttctacgcgctcaaggtgggtcccgcgctgctcgccgtgcccggcggtctgcgcacgaacaacgacttccagtgcctcgacgccgagggcgcgcccatcgagggcctgtacgcgctcggcaacgtgatgggcgacatctgcgccgtggactatcccatcaacgtggccggcaacagtcacggccgctgcatcacctacggctacctgttgggccacgagctggccggcgcgtaagatccccagtgccccgcgggagcgctcccgcggggcatcccggcggcgcgacggatcatgcatgcgcccgagcgccccatgggattgacccgtgcggcgcgcgatgcaccgtctatgtcccgtgggagcgctctcgctgcaaccctccccgagccctgcgcccctccctcccggcgcagggcttttccgcttcccgctcgctccgctcccgccgcgcactttgccgcttccacgccggatgtttcacgtgaaacatccgttctagctccccgtttggcgcatgattccggatcgagttccatgcctccgctaacggtcgaggcatctgttggaagcaggagtgccgtcacgtttccacctcccgatgtgcggcaaaaccgtcgttttggcagtccttccccggatttcgccgtgacagggcaccgccgccacggtttcgggcggcaaaaccccaggtcgggtttttccgcggcggaaaaccgggagctccggctgccaaaacgacggttttgccgcacatcgggaggtggaaacggcacggccggagcgaccgggcgcgaaagcgcccttgtgcaacggcgctccatggaggagggagacccttcgatggggggggggggtcgggcgctatgcgccaaatagaggttagagcatccgttcgagttgctgctcagttgccgaagtggatgcgggtgaaatcggcttttgagtgaaggatgcgctcgacatgaacgatgcgctcgacatgaacgatgtcctcggcctcgtcgacccaatagaaagcggcgtatttcccgacgacgagtttccagcgcaacgcctcggtgaacacgtacggtttctcggggttgcgcgcagggaaggtgctgagagcgtggtcaacggactccatgagcttgtcgatgcggtcttgtgcgaggtctggcgaaaacgtgaattggatctcgtagacggacaagaacgagaggtcctcgatagcttcttctgcgaattcgatttcatagttcacggtcggccagcttctccgcaatcctgcggcgcacttccactttcgcttcctccaagttgtacgtcttcggatgctgtttgttgtactcgacggcttcgtcgatgagcaggccgacgtagcggtcgtagtcgggcgttgcacgcgaagcgcgcgtgcgccacgaggcggaactttcgaactctttatgcagatcgcgcgcaacgttgcggtttttcgttgacttcgcgacctctggctgtttacaatgcaaaggttcgctttcgaaagccccgtgcatgcagcgagaagcggaagcgcgaacgagggagtccagacccgaggttgcgcgtcggcgtaggaacccggcatccgatcgacctgcacttttgaaaccgatcattcgccgcatcgcggtcggcccggcatcgttcgagccgccaacaggcgacggagacccgccccgcacggcggggtaggacaagatttttggaggaagatagtgaagacgtattacgcgaagcccaacgaagttgagcgcgaatgggtcttgatcgacgctgagaaccaggttctcggtcgcgtcgcagccaaggccgctcagattctcaagggcaagcacaagccgcagtacacgccgcatgtcgacaccggcgacttcgtggtcatcatcaacgcggacaagatccgcgtgacgggcacgaaggctcagacgaagagctactaccgccacagcggtttcccgggcggcctgaagtccgagaccttcgaagaggccatggccaagcatcccgagcgcgtcatcgagcacgccgtgaagggcatgttgccgaagaacacgctcggccgcgccatgggcaagaagctcaaggtgtacaccggcgcggagcatccgcacatggctcagcagcctcgcgagatcaagatggagggttaaacaatggcaggtgaagctctgtactacggcaccggccgtcgtaagaacgccgtcgctcgcgtgcgtctcgttcccggcaccggcaaggtcacgatcaacggccgtgaggcgctggcgtacttcggtcgcgaagcgctcgtgaactacgctctgacgccgttcaaggtcacggacacgacggatcacttcgacgtcatcgccacgctcaacggcggcggcatctcgggtcaggccggcgcgctgcgccacggcatctcccgcgcgctgctgtctgctggcgactaccgcgccgagctcaagaaggccggctacctcacgcgcgactcccgtatggtggagcgcaagaagtacggcctcaagaaggcacgcaagcgcccgcagttctcgaagcgctaggaacagccgctcgcattcgcgaacagcacgttttctgcaaagcccgtctcttcggaggcgggctttttctatggatccgcagccgcaacgggcgtggcgggaagcgtgcggcaccgtcttggcagaatccttctctcgcgggttgatccgcgggttccaaagcgtctcccgcttttcaaccaggatgcaaattatggtgttgacctggtgtgcttgcattgaaatggagatgatatgctggtggaataccgtttcccgacaagaaggagggggatcgatgaagcatctgatccgctttgcaagcatcgctctggcctgcggtttgctggtatgcttggccgggtgcagctgctcttcgacgcagcaggaagcgcagaagccggttcccgcggaaaccgacgagggaaccacgatcgacctcgatggcggctgggtcatgtacgcggaatccaacctgctggtcgtgctggacgagaacgcgaccacggggtattcctggacgtcggcgatcgagggttcgacgctggcgctgtacaccgagaaatccatcagcgccgaagaggcgtatccgaccgaggacgcgaaccgcgtaggcgcggaaggcagccatctgttctccttcaaggggatggccgccggtgacggcaccatcgcgctttcgtacgagcgctcttgggagcagaccgacgatgacaagaagatcgttctccaggtgaagacgggccagaacggtgcgatcgagtcggtgagcgttggctagccgacggaggggagcttacatgagcggattcagcatgcacggcgagaaggaaagcgcgagcgcattcgcgctgaagcgcgcgcgccggatcgcggcgatctgcattgccgcgctgatggccttcggcgcgttgggcctggtcgggtgcagttgcagcaacacctcgaccaaaaccgacgacgacaacgcgaaaaaggagcaggtgaacgacaagaaaaacgccaccaaaacggtgccgaacgtagtgggcatgacgaaggacgacgccgagcgcgtcatcaaggacgccgggttcgccgtgggaacggagacggaggaggcgagcgaaacggtggtcgccggcgccgtcatcagccagagcgtgaaggcaaagtcggaggcgaaggcgggaagctccatcggtatcacggtttcgaagggatcggacaagcccgcgaagcgcgtgtcggtgcccagcttgatcggcatgacgcaaacgcaggcggaggacgtgctggcctcgctgaagctggtgtcgaaggccgaagacccggtgtactcggaggacgcgaagcccggaacgatattcaagcagtcggtggccgcgggcacggaggtcgaagagggttcgaccgtcagcttcaccgcggcgttgggcaaggacttcgccatcgtgccccgcgtgatcggattggatagggacggcgcattcgatgccttgaagaaggcgtcgttcaatgtggacatcatcgaggcgtacagtggaaacgtcgccgccggcaaggtcatgtaccagaatcccagcgaaggcgttcagtgcgtcagcggcacgaaggtgaccattaccctctcgaagggagccgctcccgcgcctaccgagcaggtggccgtgccgaatgtggtaactctgacactggaacaggcgcaaggcgtgttggaaagcgcagggctggcatgcaagttcgccggggaggaagagggcatggtcgtcgagcagagcattgcggcaggcaccaaggtcgatcgcgggtcgacggtgaccgtcaagctcgagattcttcccaccggttcggcggaagggcaggctgcttgacgtcgtgctcgtataagagcgcgacgcggggacgggcgaatggctgaacaggataacgaacaggcaggtgaagccctgctgcaaaacgctcggcgaacgcttcgcgagcagccgcgccgagcgatcgcaggtttgtgcgtcgttttgctgctcggtttgttgacggcagctttggcgagctctttgcagcgggtgtcggcagacgatgtatgcgccgacgccgttgcaggggcggtgaagccgatggcgctgagcgggtcgtacgccgtagacggcggcgaggagcggccttacgcggctcgtcaagctcttgatgcgaagggcatcggcgtggaagcggtgacggtgcgcggaacgctcgaaaacgacgtcgccgcaggcgagctcgtcaacatgcgcctgagcagcacggcgtgcacggtgcgcgtcaacggcgagacggtgttctcgttcgacggtatcggcgattcggagcctgcgggcgagcctttgctcggctggatcgggttccgttcgccaggcatctcgacacgtgacgaagtggagatcgcgctttccagcgcggcatcctacagcgtgctgggcgattacgtcatcgttttggacagcctgtgcacgggtgagcccgatgctctgttcgtcgcctcggtcgccagccatctgcccatgttcgtttcgggaatcctggtgctgatcgcggggctgatcctgctgctcattgccagcgtcggttatcttatcggcgttccaaaggaaacgggcggcctgcgattcgccttctacgtgctcatcggtggcgtttggatattcttctgtttcgattacatcacgttgctcatcccgttccctgcgttcaccaccacggtgagcttgctggcgcaagacgtgctggcgctgctgcagctgtcgttcatcgcttcgcgcgccacgggatacccgcgcaggttggccacgctgctgctggcggcgttgtccctgatgctgggagtgtgcatcgttttgaggctcgcgggggtggcgtcgctgtacgaggcgaacgtcgtcatcatcccgctgttcgtcataggcgtcttcttcgccgcgctggcgcttgccgtcgaggcgcgcgagagccgcgaccggatggcggtcgatgcgaccctggtcgtgatcccgtgcacgatcggatcggtcgtggaggggctgtcgttcctgttcggcggggtgaccacgggcctgtggctgtgcgccggcatcctgtgcgccgtggtggtgcgcttcgttgcgctgttctcctacgcgcgcagccagatcgttcaggcggaacgcgcgcatcgcatggaggccgagcttttgcaatcgcgcatcgctgtgatgctatcgcagatccagccgcattttctgttcaacgcgctgaacaccatcgagtacctgtgcgaggaggatccgccggtcgcggcgcgcgccaccaacgatttcgcgcgttatctgcggggcaacatggattcgctcatggggtcgcagatggtgtctttccgaaacgagctcgagcacctggcccactacgtggccatcgagcagctgaggtacccttccatcaaggtggagtacgacgtgcgcgcggacgattttctcgtgccgtcgttaagcgtgcagccgctggtggagaacgccatcaagcacggcgcttcccggcgggctggcgagggcgtcgtgaaggtttcgtcgtggcgcgaggggcggtcgttcgtcgtgcgcgtgaccgacaacggccccggattcgacgagcgctcgatcgcgcggttcaaggagggcgtcgacgtcggcatacccgacaatcggccgccgggcgaagcgcccgcgcgcaaccatgtcggactggcgaacgtcgcggcccgcgtcgccgcgacctgcggcggcacgatgcgcgtggagaacgaagcgggcggaggcgccagcgtgacgatgacggttccatgcgaggaagagggaggttcgcgatgatcaagcccatcgtggtggacgacgagcggatcgctttggagagtttggcgaagaaactggcgcgcatcgacggcgttgaagcgccggagttgttcgagacggctgcggaagcgtgcgcgttcctcgagggcgctgccgcggacatcgccttcctggatatcagcttgcgagattccgacgggttggagcttgccgagcgcgtgcgcgaactgtgccccggatgcgccgtcgtgttcgtcacggggtatgccgattacgccgtcgacgcgttcaggatccatgcggacgggtacgtcctcaagccagtttccgtcgaggacttggagcgcgagatcgcccatgcgagagaacgccgagcgcctgccgaacgagcgcttgtgcgcgtgcagacgttcgggggattcgaggtgtacgcaggcgacgtgccggtgcatttcaagcgcagcaagagcaaggagctgttcgccttcctcgtcgaccggcgcggtgcgggagcgtcgaacgtgcagatagcgcgcgcgttgtgggataacgtgtactacgacgtctcgcatcagaagatgctgcagaccatcattgcggacatgatgaaggcgctgcgggaagtgggcgcggagcagacggtcgtgcgccgtcgcaaccatctttcggtgcggtcttcgatgatcgagtgcgactactaccggctgctcgaaggcgattccgccttgaagggcgtgcctttgggaccgtatcttccggattacgcatgggcgtcgaaaaccgctgcggcgctggagcgtgcgcgctgaattcggcaggatgcgggcgacggtcgacggatcacgggggatcctctggtatcgtatgtgcagaagaacaaccgcgattggggaggacgtccgatgctgaaggtgcggcgagcgcgagccgacgagttcgaccaggtgctggacttctacacgaacatgatcgacgggatgcgcggcacggaattcgacgtgtgctgggagcacgacgtgcatccgtcgtcggcgtttttgcgcgcatcggtggatgcgggagaggtgtacgtggggttggttgaggacggcgagggcgcgacctgcatcgcgtcggccatggtgctgaacggcgaaggcgatgccggttacgaaagcgtttcctggcatgtggcggccgcgcccgacgaggtgctggtggtgcacgtgttgggaacgctgccggcctaccacggccgcggattcgcgcgcgctatgatggaggcgtgcatcgatgtcgcgcgggcggctggcaagagagccgtgcgtctcgacacgttcactaccaacgtgcgcgcgcagagcctctacgagtcgtgcggtttcgcgaattgcggcgtttgcgaaggcttctacgaccgcctcggccgctccgctgtcatgtacgagtacgcggtgtagaagatcgcgttatgcgtcggcggctttcccgatcgaccgtattcaggaccagctgctccccgtccttgcgggtgcaaggttactttcaagtgcgttcttgcgcggctcgcgctcgctatagatacttactttatggtaatgccttgatttgcgtcctagtggacatctataagtcgcctcgcgccttctcggggatctgaagcgcttggcgaaaagacgtcggcggtcgatggggaactttgagaaaagccggagagcgcgttttcgcttaaccggcatcttgtcggttatagtgcggttttcttgccgacggaatcgctagcttggcgatcctccgtcttctctataatcaaccacgttgcccgttgaatcgttaatcgagggaagtaggtcgtatgctcgagaaaatggatgatttaacttcatgctccctttcctatgtcgcttcgatactgggaggtaaatggaagccctttatcgtgtggtatctgagcatggctcccggcaaaagggcgcgctacagcgaattgagaaagcgcatcccttacgatatctcccacaaaatgttcagtcagcatttaagcgagctggagcaagtggggatcatcgagcgtatcgtcgtggaggtcaagccgcttcgggtcgattatcttctcacggcgaagggcgtaagcttcgcgaacgtcttgtatttcatccgggattggggggcggcgtacgggggattctccgcagagacgctgcaacgcacgaaaggcacgatgggtgatggcgtgctgatgtacggcagtgccgcgagcgacgccgaacaaggtagcggcgagcgtatcatttggcaattcgacccctctacgttcgacgtgcgcggtagcgcgggcgaagaagatacggacgaagcgtaatcttcgcctgtcgaaacaagggaaagccttcaataattttcgcattatgccgaccgccttgctgttcttgtcctcgttctcttcgattgtccgtttgcctcactttcaagtaagaagcgcacttataagtgcattattgcgctgacaaccctgcgtcaacagaatacgaggtaggaaccgcatctcgaagtgacttgcggtgcaaggacggggtacgtttcagaaaggatgatcggcatgatttcgagaatcaacttgctcaaacggaaagaggggctgtctgctgaggagttctctgcgtatctgacgcaggctcacgcagggcttctggccacgatgccctacctcaagggatgcgagacgaacgtggtggtggacaacgagcagcgttcgccgtttgatcgcggctcgacggaaatcgacggttacacggagatgttcttcgacagctacggcgacatggtgcgtggcatggctgcgctcgaggaatcgcttgcagccgattacgcccagttcgcggctcccgacatcccggcgctcgtggcggtgaagaaggtcgatacaccggttcccgcctttctcgacggcgtcaagctgatcaagcgcatgtcctttctcgggcgaaaggacggtgtgagtgcggcggtgtttcaggatgaatggtggcagatgcattctgcgctggtcaagaccatgacgggctatgcaggctacaatcagaacctcgtcatcgaccgcatcgtggacggggagtccgtgccgttcgaagagcttccgatcgagggcgtcgtggagttctggttcgagaacatgaaggcgttcgacgagtgctacggaactcctgcgttcaagcgcacgggtgcgcacggagctgagttcatcgacaacatcacgacatacctggttgaggcgaagcctatcgcaatggagcaggcctagtcgagctttatggcggcgtgcccgatgagggccgccgccatgccggatatttcgaaaggtacaaggggaacctccggagcgagcgttgtccgcgttcgctcaacccgacgttcttgcagatgcgccgcatcgtggcaagggcgccatcagacccattgcgagcgacgcggtcgtctcgggctttttcgggagaggatgaaatatggtggcaactgaaaagaaaaaaacctcgttggccagggcggtgttctcggggagccttggaaatatgctggagtggttcgactacgggctgtacgggtattttgcagcgatcatttccgcagatttcttcgttgccgacgatcctatcgtcggccttctgctcagcttcctggtctttggaacgggctttctcgtccgacctatcggcggcatccttatcggcgcatacgccgacaagcacggaagaatcaaagcattgacgttgacgatcttatgcatgggagtatgcaccatgctcatgggatgcttgcctacgtactcccaggtgggtattctggcgccgatcctgctcacggtgctgcgcctgctgcagggcttggcgacgggaggcgaattcggctcttcgctgacgttcatctcggaatacgggacgccgaacaaccgggctttcctctgcagctggcagccgttcagcgttggctgcggtctgcttttgggctccgctgccggtctgctcgtcacgacgctcctgcccgaagccgctctgtacgattgggggtggcgcgttccgttccttttcggcatcttgatcgctttttacggcatgcatatgcgcaagaacgttcccgattcccctgagttcctgaaggcgaaggcggaagtgaaagaagaggaccatacgccggtcaaggagctgttcctgcgctacaagaagtccatcatcacggtcatcgggctgctggtcggctcgagcgcgacctactatattctgattacctatatgccgacgtatatctcgcagtttatgggaacctcgttctcgagcgcgttcatcgtcaacacgtcagttatcgcgatcaacctgctgctttgccctgtcgtgggcatgctcatcgataaggtgggaaggcggaggtgcctgatcgtcggttgcctcgggttccttatcttgtcctatccggtgttctacattttgattcagcagaccaacgccgtcttgatgatcggtttgctggggatactcatcgtattccagacgattttggctgtcgccatcgtggtggtttcggctgaggtgtttcccaccaagcttcgcaacagtgggatcggtttctcttacaacatcgcggccgcggtcttcggcggtttggcgccccttgctgcaacggcgcttatcgctgccacgggcgataatctgtccatcacctacttgatgataggatccgttctcgtaacgctgttgacctcggtgttccttttgaaagggtattacgtcaagggaaagagggtatccgattagcgagaagggcgcgggaggcgaccctcccgtgccctttttagtcggggcgggttaggaagaagacggcatgaccgacgtgagaggtctcgttcgcacgacgagaagcgcagccaccttttgtttgggcgtcagcttgatagcaaacgtattctttgcatcgtcgatgctcgacgatttgaacttgatgttgatggttggcgttatcgcgctgagctttgcagcgtcgaccgggtcgtcgagagtcatcgggattctgcttttcggttcgagcatagctttgttgctgcattcgcaagcgccgcttgatgtgtggaagcaggcgttacgggaaaactcgtacctcatcgccatgttcgtcctggtgccgcttttgagcattcctgtgcagcatgggggatacggcgagtcgcttcgcgaggtgttcgtccgttacgcaaacaccgacagccgttattacgcgctggtaagcatcatggctgcgttcgtcggagtgcttatcagcatcgcggcggttccgttgacctatgaggtgtcccgtgcgagcggctgcaactacgacgaaaagcttctggcttcggctctcagccgagggttcatcacctgcatgatatgggcgccgacgtcggcaacgattgctttggttgtccagctgacgggagtcgattgggtggcgttctttccttttgctatcgcatgtgcgcttgtcgccggcgccgttggttttctgatgacgttcgtaagggatgaggcggcgaaggcctcttcggatgaggcggaggcgcctgcgggcaagattgatgcggggaaggtcgtcgagcttagcgcgttcgctttcttgctcgttgtttccgtagcggcgacgtcccagctgggcgggctttccgccattgtcgtcgttgccatggcatcgctggttttccccgttgcatggatggctgccatcgggcgccttccgacgtatgcgcgggaattcaggggggactacttcaacaacaagcttccccagtcgaagaatcagatcgtcttgttcgccggggctgggttcttcgcgcagagcatcggctattcccatctgggtgatgctctggtcggatctcttttgcatatgacggggcaaagcgtgctgttgttgaccgttgcgatcatcggtatcacgcttgcgacgtcggcggtcggtatccaccccattgcggtcgttgccgtggtgggagggacgatgggcgcttctcaatggggcgtttcgcccatctacctcgctcttgttttgtcgatcagctgggcgatggggaatgcgctttgccctgcgtctgcgaatgtcgtggccgtttccgacatggtcgggcaatcgccgatcaaggtcagcctacggtggaacggtccgtacgtgctggttgcgaccgcggtgctcgtgctcgtgctcaccatggcgaggatgggtggattgctgtagcggcgattgcgatcgccccttcatggaaatgtatcgaaaccgctgatcaaaggcttgatattggaggctttggcagggggttgccgcttacttataagtgcccttatgactttaaagtgcgttattgaggctgatttcaaatgatcatagtatgcggttatgcggagttcgtaggcggtggttacagcggcgatgctcatgcaggcgaggcgcaggggagctgccgaaacacggggccatttgcacgttcgattcaaggagggtgatcgccatgatcagcagatgcggattgatgcagaaaaaagacggcatgggcatggaggagttcaaggactactggctgaacgtccatggtcccatcgcaagcaagatggcgaatctgcgcaagtacgaccagcacgtcgtagtcgatgccgagcatcgccatgctatcggacggggttcggtggttatcgacgggtattccgagctgcaattcgacagttacggcgacatggtcgagggcgtggagtcgctgcacggcgaaggagcgaacgatgtcccgatgttcgccaacccccattgccaaattctcgtgctggccaagcgcgaagtcattcggatcctggagtacctgcgcggcaggaagctcatcaagcgcgtgtcgtttctcggtcgcgccgacggcgttacttccgagcaattcgtcaaagaatggtggaacgtgcacgaccgcttggtgcagaccgttcccgggtgcgtggggtacaaccaggatctcgtcatcgaccgcatcgacggcggcgtatccgttccgtacgaggagcttcctgtagaaggcgtcgtggagatgtggttcgaaacgaaagaagcgttcgacgagtactacgcttcccccgaattcgcgcgcgcctctgcgcacagctcggagttcatcggggcgatcaacacctacctgaccgaaacctatccggttgccttgccgtctgcataggagcctgcgatcttccgtcaaaaaagctgcgtttcagtaaagaagaagcacgagaaaaaggatcaacgatatgaaagcttacgagaagttgctagagccgataaccatcggtacccaccagtggagaaatcgcatggtcaaagcgccgtcgtccgcgatgtcgtgggatccgggccagttctgcaacgagaggatcatcggcctgtacgatgcgatttccaagggcggcgcttcggcgatcatcttgggcggcatgatctgcgacgatcctgccaccttgatcgacgatgccgacggcggcgtgtacaccgtggaaacctacccgctgggcggtttgtacgatgacaagttcattcccggcctttctcaattggccgacgccgtgcacgggaacggatgcgagctcatcgcccagatattccagaacggtgccgccatcaagaccaagggcggagcctggtgctcttccacgttgaccgcagacgagctcccgagccccgaaccgtactgcaaccctacgcgcggcctttcgcttgaagagatcgaggcgttcaaagagcgctacttcgcagcggccgagcgcgccaagaaggccggtctcgacggcatcgaggtgcacgcggcgaacggctacttcctgctgagcttcgtgtcgcgcgtatggaaccatcgcgacgatcagtacggttgccagtccgtcgagaaccgcacgcgtttggtatgcgagatcatccgcggcgtgaaggagcggtgcggcgaggacttcatcgtgggcgttcgcacgaatggccaggaatacgggcatcccgatgccatcaccatcgaagagggcgtggagatcgcgaagttctacgatgctgccggagccgactacatcagcgtgacgggttacggctacggtccggttcccatgcagttcgctctggactactggatgtacccgtctcccgacgaggatatgaagcagttcctcgatcgtctggacggcgaaggcctctccattccccccgctgccgccatcaagcaggccgtgtcggctccggtgttcggcgtcggcttcgcaacgcctgaaaaggccgaggcggcgcttgagaagggcgagatcgacctggcgatgttcgcacgcgctctgtgggccgaccccgacatgcccaacaagatcgcggaaggggcacccgaggacattcgccgttgcaaccattgcgcaacgtgcgacgagctgcgcatgaacgagacgccgcaccgccgttgccgcgtgaacccggcgttcctgcgcgagcgggaaatggccgtcgtgcctgcggagactaagaagaaggtgctggtggtaggcgctggcgccgcgggtctcgaggctgcccgcgtcgccgccgagcgcggccatgaagtcacgctgtgcgagaaggaatccgtcctggccctcgagctcaacctggccaccatggtgaagggcacggtgtgcgagaacgtccctgcgctcatcgattggctgacgtctcaggccaagaagacgccggggcttaccatcaagaccaaaacgacggtgacgcccgatttcgtgcgcgccatgaagcccgatgcggtcatcgtcgcgacgggaggcgtgtacggcgcgcccgacgttccgggcatcgacttgggtatcgtctccacggttccccagctcacccgcttggccgaaaagccgctcaagctcttcggcgcaaacgccatcaacaagctctcccagatcgccctgccgggcatcggcaagaactgcgtcgtcctcggagctcagatcgaaggcgtgcaaggcgcgatcttcctgcgcaaacgcggaaaaaacgtcacggtgctcgaagatttggacacggtgggagaggggttgccgccgcggtacaagagcaggtcgcttaagtggctgcgggaaaacgacgtggagacgatcaccggcgtcgagtaccgctcgatcgacaagcgcggcatcacgtacgtcaaggacggcgaagagcgctatctcaaggccgacagcatcctggtgttcaagtctcccggttccggcctgagcttgtacgaccagctgaaagacctggcccccgaggtgtatcccatcggcgcatgccagggacccggatccacgctcatggtcgacgcggtgggccagggccgagccgtcgccctgaagctgtaatcgcgagacgaagggaggggagtttgcatgaaaggcttcgagaagcttttgtctccgattgagatagcgccgaatttcgtgttgaagaaccggatgatcaaggctcctcagtcgtcgtggcgctggaacgaggactgcaccgccgacggcagcgatgccatcgccatgtacgagaacatggcggaagggggagttgcggctatcgatgtcgcggccatactgtgggaacctgcgggaggcatctacctgggcgcttacgacgacaggttcattcccggcatgatcgagctcaacgaggccgttcacaagcacgggtgcctcaccatcggtcagttgcatcatatcggtccttcggccggcccgacccctgacgggcctcccccgatctcgtcctctacgttgtccgaggacgagatgccggttcccaagccgtggtgccaagcccctcgcggcctgacggtcgaggagatccacgagaagcagcgcttgcagatcgaggctgccgtgcggctgcagaagggcgggttcgatgccgtcgaggtgcacgtggctcacgggtactttctcgacagcttcgtcagcccgctttggaacaagcgcgatgacgaatacggttgccagaacgtcgagaaccgcacgcgcatcgtgcgcgagatcatcgaaggcatccgcgaggcgtgcggccccgacttcgtcatcggctgccgtctgaacgggcgcgaattccatcccacgaagcagggtatcacggccgagcaagctgccgagaacgcccgagcgttcgtggaggccggcgcccagtacatcagcatcgccggatacgggtacggtcccacgccgtttcgctactgccccgactacttcccgtacccggaacccgatccgttcatggagcccttcatggacgagtaccgcggggtgggtctgtggacggccgttgctcggcggatcaaggatgctgtggacgtgccggtcatcacggcgggccgcatggacgagaacttggcagagcgcgtgctcgaagccggcgatgccgacgtcatcgcgctcggccgcacgctgtgggccgatccgtggttcgcgcgcaaggtggacgaggggcgtatcgacgagatcatgcgttgcacgcgttgcgcgagctgcgaagatccggtcacgcaaccgcgcatctgtcgcgtgaatcccaccttgggtcaagagcgccaactagccgccaagccggtggcgaagaagaagcgcgtgatggtggtaggcggcggtccggcgggcatggaatgcgcgtgcacgctctccgaacgagggcacgaggtgaccttgtacgagaaggcgggcgctttgggcggacgcatcaagctggcggccatgatcaagagcggcggatgcgaagaggtcatgcatatcttcaaccacttgaccgccatgatcgagaagtctgacgtcgaggtgaggctgaaaaccgaagttgacgagcagctcatccgccaagaagctcctgatgcggtggtcgtggccacttcgtcgccgtatcgcatccccgatattccgggcatacatcgcaagaacgtgttcaccatcccgatgatgtcgaagcttgcgcaggtaccgctcaagatgttcggtccggacaagcttgcttcgatgagcgagaagttcttccccgtaggcaagaggatcgtgatttggggtgcaggcgccgagggcgctcaatgcgccgagttcatgcgcaagcgcggcaaggacatcgtgctggtcgccgaagatggggatgtgggcggtttgattccgctcaagtacaaagaacgtatcgagccgtggttcaatcgcgcaggggttcgtgttgtacgcgatgccacggtggctgaattcggcaagcaaggggcgctgctgaggttctcgcaggggggagaagagctggtgccgtgcgattccatgatggtcatgctgcctgagcagcgcgacccggcgtttttcgacatggccgcgtcgctcgtcgacgaggtgtacgagataggctcgacgctcggcggcgagaacgcgttcctcaagcatgcgttcgccgacggacgccgcgtgggctgtcttctgtaaggcatcatcccgtgtcccgtcgtgtcaatgcgcgcgactcggcgggacacggagtgcatgaagggaaaccggaagcgacgcgaaccgagggaggtgactgccgggcgaagccagggtttcgcacgagacggaccgctgttcgtttcggaatgcaatttcgaaggtaaacaaggaggaaagaacaatgtcggttaaaacttatcgtcgcggggtcatcctgatctgcgcggccttgtgcggtgcgctgacggcgtcgttgaatatttggagcatcttccagaagcccctgatggaagcttatggcttctcgcctcagtcggtgtcgttcgcctacaccatcgttatcgctatgatcggtttgagcggtcccatcggcggatggctgcagcgcaaggcgcctgcgcatatcatcatgaccgttgccggcatcggcttcggcctgggctggttcctgacgggctttgccagcaccatcccggtgctatacatatcgttcggcctgctggtaggcgtgtgcgacggtatttgctacaaccttgccctcgctatcgctacgcggtggtaccctgacaagcgcggtttcgccaacggcgtggctctggccatcatggccatctacccgttgttcacggctcctatgggcaacatgatcatcgagaacttcaacgtgagcatcgcgttcaacatcgtgggcgtgttctgcatcgtcggcttcatcgtgttgtcccgcttcctcaagatgcctgctgctgatttcaagcccgagggttggaatccgccggccgagagcgatacgaagcgcgtgaagaactacacgtccggtcagatgctgaagaccccgttcttctggacgctgctgctgttcttcggcaccgttgcctgcaccggttgcgtgatgctgtccacggtttcgctggtggggcaggtccaagccggcatggatgctgcgacgggcgcgctcatggtgggcatcttcgccatcgccaacggcacgggccgtttgggtctcggcgccatttccgataagttggggcgtttccaaaccatgttcgtcgccgttgcggtgacggcggtcatccacctgttcctgttcgctaatgcaacgagcaccgcgatcttcatcgtggaggcatgcattctgggtatctgcttcggcggcatcatggccatcatgccgtcggtatgcgccgatgcctacggtcccggcaatgcgggccagaactacggcttcatgttcatcggctacacgctggcctcgttcatcggcccggtggtttccgccaacgcgcttgccaccacgggcagctacagttctgcattcccgttcctcggtgcgctctgcatcgtcggtctcgtgctgctgtcgctggcgtggatgttcttcaagaagatgaaggctaaggacgccgctgaagcgtaaaacgcgtatgtgctggtcggatgcatcttaccaataagtgagttgcgcactttcaagtgcgttgttgaaggcgcccaacagctgccggatactaaaattcccgaacgatctgaggaaggggtaggacatgatttccaggattagcttgctgaagtgcaaagaaggggtttccgaagaggcgtttcgcgagggcatgatgggggatgtgcgcgacgtgatcgcccgcatgccccagctgcggaagtgcgagatcgatttcgtgaccgatcgccagcagcgctctcatctgggtcgcggcgccatcgacatcgacggcttcatcgagatgttcttcgacagctacggcgacatgcagcaggcgatggacgaagcgggggatgctctgctggctgctctggagccgctcgtggaagagcccgtttccacgctggtcgcggtgaagaaagtagacacgcccgttccggcctacctcgatggcaaggctatcaagcgcgtgtccttctgcgatcgtgcggagggcgtcgatgccgcgacgttccatgacgagtggtggtacacccattccctgctggtgaagctgatgagcgggtactgcggctacaaccagaacctggtcatcgaccgcatggtccaaggcgcgtccgtccattacgccgacctgccggtcgaaggcatggtggagttctggttcgaggatatggacgcgttcgacgagtgctacagcacggtcggtttcaagctgcgcgcgagcgtgcatgcagctgagttcatcggcaccgtcacgacgtatttcgtcgaagccgtgcccgtggagctgaagaagtagacgagagtccggtcgcatcgtgctcgcggcgcggtgcgaccgccgtacgtggaaagggaaggttgccatgaagtcaaagcgagcggagtttttcgacaacgccgtcgtctcgggtcccgatcagaaggcgttcgaagagaaggtctacgccgaggcgcaggccaagcgctggccgcgcgttgccgaggggacgggcacgttcgagggccaggtggccatcgtgaccggcgcggcgggcggtcagggcgagatggaggccaagatgatcgcccagcagggcgccaaggtgtacatggccgacatcgaggaagagggcttgaagcgcgtcgcggccgccatcgaggccgacggtggggaggccgtcgcgtttccgatggacgttgccgacgaggatgcctggcgggcgctggtgaagaaggtcgtcgacgaaagcggtcggctcgacgtgctggtcaacaatgccgggatgtgccagaacggcaccgtgctcaccgagacgcgcgaatccctgacccgcatcatggacgtcgattgctggggcgtgtacaacggcatgcactactgcgcgcccgctatcatcgaagcgggcggcggcaccatcgtcaacacgtgctcctatcagggcacgcatttcggccccggaagcttcatcggctacgccatggccaaagccgccgtcatgggcatgacgcgcgccgccgccaccgacctcgggacctacggcatacgcgtgaacgccgtgaaccccggccttgtgctttcagggatgaccttgccgcgcggccagaaccgcaagggtctggtggacgcctcgtcgatgaagcgctacgcgttgcccgaggagattgcctcagtggtcatgttccttgcttcggacgattccagctttatcaacggcgagttcattgccgccgatggcggtgccacgacgtatcttcatctggcgacggccgacgcaaagtaacggcgcgttctgcgtcgatgaaggcgtgcgccaaagggggagggttggcgcacgccgatcggcgcgctcgcggtaactcattaaggagaaggggtgtgtcatggctcggttcgataacaagatcgtgctggtcacgggtgcggcgaacggtatcgggcgttgcatggtcaagtgtttccttgcggaaggcgccgagaagctggttgccgtcgacatcgagcacgatacgttagaggatgcgttcggcgacgaggatcgcgttcataccataccgtgcgatatcaccgattacgatgccgtgcaccgcatggtcgacgaggccgtcgaacgcttcggtcgcatcgacatcctcatgaacaacgcgggcatcagcatcaaggacgggcagaagtacggtatgctcacctgcccgaaagatgcctgggatcgtgtgatcgccaccaacgtgaacgggtcgttctacgtggcgcaggccgttgcccaggccatggtggcgaagaagacgaagggcgttatcgtgaacacgtcctcgaacaccttccgtttcataccgaagtaccttggcgcgtatcccgcatccaaggcggccatcgccgtgttcaccaagcagttcgccaaagagcttgccgagtacggcatacgcgtcaacgcgttcggacccggcacgacgaaaacccgcatgagcgagccgacgcgtttgaacccgcacatgaacgagcaattcttgaacgatattcccatgcaccgctacggcgaagtgaaggaggccgtggatgcggcgctgttcctcgcttcggaagagtcttccttcatgttgggagagatcatcttcgaggatggtgggcagagcctctagctgtgcgttagattaggaggacgacaatggaaagagagcggtttgttgacaagatagccctggtaaccggcggtgccaacggtcttgggcgcggcatggtcgagcaactcgtgaaggagggtgcccaggttgccatcttcgacatcgaggacgatacgatggaagaggtgttcgggggcaacgatcacgttttctgcgtgcactgcgatgtgcgcgactacgatcaggtgcaggaaagcgtgcagaaggtcatcgatcgatacgggcgaatcgacgttttgatgaacaatgccggcatctgccatcgggagccgtttctggagtgcagcaaggagggatggctcgatgtgatggccacgaatctgaacggcgaattctacgtcggccaggctgttgcgcgcacgatggtcgagcttggcgtgaagggctacatcgtgaacacgagctcgaacagctcccgcaagaccatcggcggcatcactccctattgcccctcgaaagccgccgtcaaaatgcttacgcaggtgatggcgctcgagctggcgaagtacggcattcatgtgaacgcgatagctcccggcacatccaaaacgcgcattgccgccggaacgatcaacgatcctgagcggagcgctgcgttcctggcgaagatgcccttcggacgctacggcgaagttcgcgagacggtcgacgtcgcgctgttcctggcttcggaagacgcttcgttcattacgggcgaaaccatctacaacgaaggcggtttcagcttgacctaggaagagggagttatggcaactgttgaggagcttgagaagcgcatcggggacttggaggacatgagggcgatcgagcggttgcaggccgagtattgggataccctcgatgccaaagactgggatggcctgcgggcatgccttgtggaagatttcgtgttcgtcaacaacacgacaggagggctctacgaaggacgagaggggatgctcgccacgatgcgagccaagttcgcagacggcgtcacgtcgagccatcaaggacaccatcattggatcgagctgacgggcgaagaaacggcgcgttcgcattggtcgctccaagacgatctgtacgatgcacagcgcggaggcgagttcgtgggtcgtgcccattatgacaacgagtacgtgaagatcgacggacgatggtacttcgccaagatgtcgctgacgtatctgcggggcgaggcgaacatcaaaaagcgctacgaagactgcgcgaacgcctaccaggttttcatgatgtgagggttggcttgatgcgggccctgtccaacgaagggagcgagcacgtgattgttcggtgcggattgcttaagaagaacgacaagttcacccaggaatcgttctcgcatcattggctgcatatccacgggccgattgctgcgggaatgaagaacctgcgcgtttacaaccagaatctcgtcattgacaacgagcatcgtcacccgattacgggaggcgtcatcgatatcgacgggtattcggagctccatttcgatacgtacagcgaaatgctcgaaggggttcagtcgctggatgccgaaaccggtaacgcccttctcgacgacgccgagatccttttgcagaagcgcttgtgcgacatcctggtgttttcccgcaacgtggtgcgcgaggttcctccgtatctgcggggaaagaacctggttcatcgcgtgtcgttcttgaatcgagcggagggagtgagcgtggccgaattccgtcgagagtggtgttatgctcacgcgaagctggtggaggctgttcccggccatgcgggctacaatcaaaacctcgtgatcgaccgattcgtagacggggcgagcgtttccagcgagaagcttccctgcgatggcatggccgagttctatttcgaggacatggatgccttcgagtgcttctacgattccaaggaattccaacgattgacggctcatggatccgagttcatcggctcggttgacacctacctcgtcgagacccatcccgttgtggccgggtcagcgcgcggagggtactgcctataggcgaattctgcgagacggattgacagcccgcttcctcggaggcgggctgtaggcttttgaggcgaagctaggggcttgtctcgcctcgctcccgtttcgaccgctccctcgctccgagttgtccccgaatggcaagctatgacaaagtttgttttggagaacttggtttttagcgagtggtggaattcgtgacctggctgtatgcggaggcgttttccgcattgccagcttgaaccgctttaatccctctgtcgaaattgtcataggtgccgttttgcgcccacgcgctcaagtaagaacccggttgcgggttgcgacgcttccctctatactgtagtacacgtaatacgtcgatgggaggcgcgatggagtcggttatgaccgtgcggttgaacggcgatatgaaggagcgcgctgccgcgatcatgcggcgtgaaggctacacgccgtcctcggccgtcaggcgcctgttcgaatacaccgtgaaacacgacggccttcctttcgagaagagcgagaagcccgatagggacgagttgcgccgccgcatcgaggcgttcgatcaggtgcacacgaagcgtcccttgacgatgtccgacgaagagctgcgggaagcgcgtttgaaggatcgctatggatttgatgcttgataccaacatcattctcgaccatatcggtcgacgcgaaccgttttacgagctgtcgcgccgcgtatgcctgctgggagtggtccaggaagcgtccacctacattagcgtgaatatgctgaccgacatctactatctgctgcgcaaggactacggcagcgatgctgcccaggagatgatcgagcataatctgtcgttccttcagatcgtaggggtatcgccggaggatgcaaggcgggccctcggcttgtgctgggcggatttcgaggattgccttgtcgcccaatgcgccgcgaaaatcaaagcggactacatcgtcacgcgcaacgtcaaggacttcaaagcgtctcctgtcgaagccgtcacccccgaagagctgttcgcccgtctgcgcgagcagggcttggactacgaagaagtggagtggtagcgcgttcgaaaagaagccccgcgcggtgggagagccagcgatgcccaggtttggagcgcgctggagccgagggagggaagatggccccagcgcgttctggggagagcgcggccggcgggcataagcgcgaaccggccgccgggaattcggttacgcttcagcgagatccttgcccagcatgtaggcgaaggtgttgcagttcatgcccaggttgtggccgcagatggcgaagttgtagcagttcgcgtagctgtcgcccaccatgatgcccaggttgtacaggccctcgatcggctcgttctgctcgtcgcacacctgcatgttttcgttggtgcgcaagccgcctgtcacgcagaggaagttagcggggctcatctcgagcttgcagccgtagaacggtccttccttgatgggcgcgaggagcgtcgcgcttttgtggaagtcgtcgtcatacttggcttcgcacaactcgttgtagcgctcgaccgacttcttcgcgttctcgggatcgagcccatcgagttgcgcgataacctcttcgatggtgtcgcccttgacgaacgtccctttctccacattgctgtcccacgaggcgagatacccctcgggcgtagtcgcgttcttgccctcgttctccacgatggtggtgccgaacgtttcccaggtatcgaaccagttcgcgtaagcggtgtcccagatgccgtagcgcgtcatgtcgggttgcatcatcatggcgtaggttccgtacgagaagatgacgtcttcgttcgagtagcgctcgccctttttgttgagcagcagtcccgagaaatcagcgatagactggcggtagggcatgggtcccacggcgtcgatcatcggtgcgttcggaagcgtttgctgccaggcggcgcccacccacagtcccatcttttggccgtcgccggggccgaggccgccgaactggaacatggcgtcgtaatcaacttcgttgtactgcaaaagcggtgcgacccaggagcagtacttcgccatcatgtcctggttggcggagaagtcgcccgtcgccagcacgatggcctttctgcccacatatttcacgtagttaccgtcggggtccttggcgacgatagcggaaacgcgcccggtgttgttatcctctcggataaggtattggccgatagtgctgtagtgtatctggccgccctgctccttgatcttctcttcgtacatggcgatgacgaggttctcgcccgtggcagcgcccgactctttgccgtcggcctgctccacccagttatgggagccggggtgcgccgtgaacacgccctcggtgtcggtgtagccgatctccatcgtagtggtgtagcccttcgcttccatgagatcgatgagccagttcatggtggaggcgctgttgttgatccacttgtaccatttcttctggtccacgcgatagccgttgcgcgccagctcttggcggatgaagccgtcgatggtgtccttcgtgtagtcggtaatgcccaagcgctcgtggaacttcgtgccgatgccgtggttggagccgccgcgcgcaactggttgggaactggcggcgaacaggatcacgtcggctccctcttccgtagcggatgccgcgcaggccaagccggagacacctgcgcccacgacgatgatgtcggcctcgtaggcttgcgcgatctcgctgtcggctacgggttcgggcgcgatctcgaacgcccaggtccccttgctgatggcctcggcgctcaactgccctgcggtgccggaacttgccgaagcgttcgacgatgcgccgccgctcgcgccgcccccgttcgctgcgcagcctgccaatccgaatgcggcggtacccgcacctgcgagcatcgcgcctttgaggaagctgcggcggtcgaacgccgttcccttggtgatcatacggtcctccttaccccgagcatgcggtattgcatgcttgttcaacgattcgcagtgtacgaatatcccgtcggcaaacctcacatagcatgggtgaatttcgccgttttcacccacggaagggggtggggaaggtatggtggcatcatgggaagagcatcggggagggtgccatgttgaggaagatctcgcgcgcgttcgacgcatacagcgtcgggttcgctatctacctggttttgagctccacgtcggcttggggtttgcttcatatcgcatccatgacgtcgctttcgttcagcggtatgagcggcggcgagaccgcacggtctattggctacatcggcattttgttcgcgttcgggttggggtgcctctacttcccgtcccaatgcaagcgcgataccacctaccattccaccgtgtgccttgcgctgggatatgcggggctgttcgcgacggtattcgtgcagaacgcggcgctgcagaacctttcggcgtttcttgtcggagcggggtcgtcgctgtccttcgtgatgtggcagcggctgttcgccgaacagggtgcggacgatgcagcgcgccggatcatcgtcggatccgcattgtcggcggtgttctaccttgtcgtgacatgcatcgcttggttttggctgtacgcgatcgtggtgttctgcgttgttgcgctcaacgcgctgttcctgcgacgctgccgcggcaacgtgtttcagcgggagccttcgggcatcgttgtcgggcagagcggtggcacgacgcttgctaacatcgtgtccagcacatggcgctacatgctgtgcattgccgcaatcgggtatgtcggcggggtttcgcgtatgttcgcccagcaaagcggaagcgattcgtctgtcttgaacgtgacgctggctcttggcatgctggttgcggccggcggcctggctttggtgtgggacaaggtgcgaggtcgtctgtcgtttccagcggtgtacaccgcggtgttccttgcggtgatgaccggctttttgtttctgccgttcttcgatgcgggctatcgcatgttgttcgccgggatggcgaacgcggcattctcgctcgtgtctatcttcatgatggtgacctgcatcaagatcgcccatttgcgccaggtggaccctatagccgtgttcggcgtgttctcgagtattgtgtacggcggggtgttgatcggtcgcgcggtgggcgacgctttgggacggacgtacgacatctcccagattctcgtaattgcgctcatgtcgacctacgtactatcgttcgcgggggttgtggtcaacatgcggcgcaaaggaaaggttgatcgggagttcgacccgatcgggggagccgctgaatccgagcctgagggcaaggagttctcgggcgaaggcggcgcggttgcgcgcccatcggacgagcgccctgcgccccgtcctcttgtgcgcaacgtcatcgtggcgcaggatatggttcccgtgtacagccgtctgctaaaaaagacctacgggctgtcaaatcgcgagaccgacgtgcttgagctgatcatgcgcggtcgcgatgtggcgcgcatgtcggaaacgctgttcgtgtcggagaacaccgtgcgctcgcactgcaagaacctgtaccggaagctcgatgtgcacaatcgtcagcaggttttcgacctggtggaagagttcaggaagagagaggaatgcgatgtcgattaagatgaagcgcctggaagaggttgcctgcgtattcgatgatcggtgcgcgcccgtgcgaggggcgcagcggttgctgcggaaggggccgtaccggctttatgtcgagacgggtttcatccccttcgacgattatgctttcgatggacggttcctcttgctgggatcagtgtgcaacgtggaggctcccagcgggtgtttgcaggtgacggaagcacgtggaaagttttcggcgaccgatttgtaccatgtggttgcatgcgacgacgatgccgacacggtttatctgcgtcacgtcctatcgcgcatcccagctgccaagcatgcggacatgagtgggcataccgtgcggctcacggagagcagtctgcgacatatttccgtgccgtggcctgatgcggacgttcgtcgcgccgtggcgcggtatctggacgagtgcgaatcgcgctgccgtgaccttgcggcacgtaatcgaagcttgttcgaggagggggtcgaagcttatcgtgaagccgcgagacgctcttcgaagacgatgaagctggggaacgcgtgcgctatgcgcgagggctcgttccttccggctgaaaagcgcagtgcgaagggcgcgctcccggccgtctcttcgcagggcgttatggcgtacaccgacgaggagggcgtacgagagcagtgcgtagtcgtagggcaggcggggcaataccttgtggcccgcatgatgcctgaaggcgcgtatcctttggtcgacacgattgccttgacgacggatgcgtctgaccctttgacggtggatgcgctcgtgttcgcgctcgcctcgctcggtattcgcccgcgtcttcgcgttgtcgatcgtgcggtggaggcgctggcgcttccgctcgaggagcttgtcgcgttagagatccccttgatcgaggagggcgagcgggacgcgcgatattccgagatgcgggcgattctggaatcgatcgaaaaaggagagcgcgaggcgaaagaggcgcacgcagccgccaaggtgctggttgacggcttgtttgcgggacgcgaagaggcgctcaagcgctttgtggaacccgcgccgcatgaggtgcttgaagcgctcgttcaggatgtgcgatcggatctcgcccatgtcgagggcgttgcggcgtcggcgttcgatgcggcgtgggaggtgctgccgttgctgttcgtgcgcttggttgacgacggcgcggcttgggcgcgcgttatcgcagccgaggatacgccggctcagatcgatgtggaactggagcgttttgcggcccaggacgaggggctgtcgttcttgagcggtttcgccttgagcgcatcgtcgttggacgagtcttcgcaacgacgcatgatcgatcggataggcgatctgcggcttgacggctataacggggaattgctccgttggctcgctcttggaaacgaacccgagccggacgcgccgtgccccgctgccgtgagcgatctcatggcgcgtattgcgctagcgttcaatccctctgctgcgcaagcatacgatccttgcttgggtgtcggtgatacgctggcggcgcttcggcgttttgccccgacgattcgctgcggcggccagaccgtccgtttccccgatgcgcttgtggcgaagctggctgcgcgctgcgaagggtggttcttcgacgacggtgcgttggcggtgggatccgcgctggtcgaagacgaactcgcgggtaagctcgctgatgtgatcgtgtcggtgctgcctcccaatcagggagaatggaccgaccatgcacccgatcccagcgacacgcgttgggcgttcggcgttcctccgcggaataaggcgaaccttgcgtgggtgcagcaggcgtttgcccatcgagcaccgggcggcatcgcggttctggcggccagtaatgccgtgctgcacgaatcgcgaggctgcgagcctggagtacgtgccgccctgatcgaatcgggatgcgttcgtgcagtcgtttcacttccagggggtctgttcagcgacgggagggttcctttcagcatcatcgttttgggcgacaagcgctcagtgccttttgaaaccctgttcgtcaatgccctggaatacggcgtgccgaacgtgacgagggcggggcgcgggcttccgatggatgcgcgcgatcgcgtcgtgtcgacggtggagcggtggattgcgaccgggtcgagcgtattcatccctggatttgcgcgcagcgtgccggaaagtgagattgttgcgctgggagacctgacgccttggtcgtacgtatagctacgaaagagcttggaagccgcaggttcgaaaacttcttgaaacatttcgccgttagtttgattacggcgtattgatcatgcggtttgacctgcggccgtgctatcgtatgcgggtggttcatccgcgcgcgtcgcgggaggccgcgcaccgccttgaacgcaacgagtaaggagctcattctcatggcgaaggtttcggaaatctacggctcgatggtattcaacgagcatacgatgcaggagcgtctgccgtctgccacgtacaagagcctgatcaaaaccatgaaagagggcaagcccctcgagatcgaggtagcgaacgtcgtggcccacgccatgaaggaatgggccatcgagaagggcgccacccacttcacgcactggttccagccgctgaccggcatcacgtcggagaagcacgacagcttcctcgacccgtgcagcgacggccgcgccatcatgagcttctcagggaaagagctgatccagggcgagcccgacgcgtccagcttcccgtccggggggctccgcgccaccttcgaggcacgcggctacaccgcctgggaccccacctcctacgccttcatcaaggacgaggtgctgtgcatcccgacggccttctgctcctataccggcgaggcccttgacaagaagacgccgcttttgcgctcgatgagcgcggtggaggagcaggccaaccgcgtgctggccctgttcggcgagccgcgtcagcgcatcgtgcccacgctgggcgccgagcaggaatacttcctcgtgtccgagaaggcctatgccaagcgccaggatctcatcatgacgggccgcaccctgttcggttacgccccctgcaagggccaggagctcgacgagcattacttcggcgccatccgccccaccgtcaacgagttcatgaaggaactggacaacgagctgtgggcgctcggcgtgccggctcgcacgaagcacaacgaggtggctccggcgcagcacgagctggctcccatcttcacgaacgtgaatcgcggcgtggacgagaaccttctcaccatggagaagatgcgcctgctggccagccatcacggcctcgtatgcctgcaacatgaaaagccgttcgagggcatcaacggttcgggcaagcacaacaactggtcgttgtctgccggcaagaagaacctgttcgaccccggcgagagccccatggacaatctgcgcttcctcgtgttcctcgcgggcgtcatccaggcggtagatgactaccaggagctgctgcgcatgtcggtggcatccgcgggcaacgatcatcgcctcggcgccgacgaggcgccgcccgccatcatctccatcttcctgggcgatgagctggacgccatcgtggacgcgcttatcgacgaccacgagtacacgaacgccgagaaagtcgccatggatctgggcgtggccgtgctgccgaacttcctcaaggacaacaccgaccgcaaccgcacctcgccgttcgcgttcaccggcaacaagttcgagttccgcatgcccggctcgggcgtgaacctgtcggattgcaacatgatcctgaacacggccatggcgaagagcctcaaggacttcgccgacgcgatggagggcaaggccggcgaggaattcgaagccgccgccatcgattacatccgcgacgtgctgacggcgcaccagcgcatcatcttcaacggcaacggctattcggaagaatggacgcgggaggcggagcgccgcggcctggcgaaccatcctacgacggccgacgctctgccgtgcttcgtcgaaccgaagagcatcgcgctgttcgaggagttcggcgtgctcacggaaaccgaagtgcgcagccgctacgaggtgaagctggagaagtacaacaagctgctgaacatcgaggcgcgcacgatgaagcgcatggtgcgccgcgcctacctgcccgccatcaacagctacgccgccgaggtggccggccacatcaacgccatccggtcggcttgcgccggtgccgacaccgaccagcaggaagagctgctgcgccgtttgctgctgggcatcaaggagatcgacacgcagctgcgcgccctgggcaagctgcaccacgagacgctggagatcgagagcgagcaggagaaggcgaacacctacgcgcacgaggtcatccccgtcatggacaggctgcgcgccgccgtcgacgggctcgaagtcctcgtcgatcgcgaccactggcccgttcccacgtacaacgacatcctgttctacgtgtaagcgaaacgcttccagcggccccggctatgccggggccgcttgcacgctcgcccgaaaaacacgctttcgggcatgattccgtgtttttcgggcgagcgtgcctagcgttcttgcggggcaaggtcgctgtcgggtgccgctgttggttcgtctcctgcatctttgatgcctcggagcggtacgttcgagcgcagcagagccacccagccggcgatggcgacgcccatcgaaccgacgatgatgacgcccacgcctaccacgtagttcggccacggcagtacggcggcaagcatgccgacgcagccgatggcggtgtgcgcgaagttgatcagcgacgatgcggctccggtatcgccttcctgctgcgacagcaggacgttggtgctgtacggccgaacggcagcctccgtcagcgcgaacgcaaggaacgtgatgcagaacagctgcgggctcgcttggcccacggccagcatggccgcgccggacgccagcgcgatgcccagcaggatgctggtgaaccgccgcgcggacatgaaccgcgaggccgcaagccagatgaacggccccgcagccgtcagcagcgcggcgaacgcgaagtacatgctgtactccagctcggtcagcccgaagaacgtgatgtacacgtacgaaccgacggcgatgtacgccatgaacggcaggttgtacagcccgacgatgcccaggaacgccgagaaccccttgttgcgcgccaccgcgcccagctgcttcacgcttcccagcacggtgccctcgtagcgttcgctgacgggaagcgtctcgtcgaacagcagcgccagcccggcgcacagaaggccgatgcccgccagtacccagaacgtcatgcgccagtcggcgacctgcaggatgagcgcgcccgccaccggcgccagcacgggccctaccacgaacatcacctgcacgacggacagcagagcctcgcgccgttcggggacgacggcgtccttcaccaccgccgtggacaccgcgctcaccgccccggcgcccaaggcttgcaggatgcgcgtggcgatgagcatgacgatgtccactgacagcgcgcataaagcgctggccagcgcatacgtgagaatgcctgccagcagcacgggtttgcgtccgtagcggtcgcttgcgggtccgaacgccagcagcccgacggcgaagaacaggaagtagcccaccagcgtgaggttcaccatgctctccgacgtgttgaaatgctcggtcatgtgcgggacggccggcgtgtacatgtccagcgaaagcggcgtgaccagcgacgtgatgaccagcagcacgatgagccccagcggccccaaccgccgttgaggccgtgcgagccacgagtgtagtgccatgtgcgtagatctccttgcgaagcagatgcgttcaggttgagcttccagtatagaagacttcgccagcgtcgtcaggcgggcaaggtgggcagcgtgagggtgaacgtggtgccgcgctcgtcgtcgctggcggcagcgaggttgccgccgtgctcctcggcgatggcgtgcgcgatggccagccccaggccgtagccgctgtcgtcgcgcgtgcgcgccttgtcggcgcggtagaagcggtcgaacacgtgggggagatcctcgggcgcgatggcgaagccggtgttgtgcaccgccagctcgatgcggcgcacgctttggcgcagcgatacgttcacgctgccgccgtcgtcggcgtacttgcatgcgttgtccagcagcgtgcccaccaacttgcgcagcctcatcgcattgccgcgcaccatgacgctctcgtccagctgcgattgcaaatcgacggcgcgctcgaacgccacggactcgaactgcagcagctcgccttccaccaggtcggtgaggtcgagccgctccatgggcggcggcgcggcgccctcgtcgacctgcgcgagcagcaacaggtcgcctaccaggccctgcatctgctgcgcttcgtgctgggtgctctcgatccactggctctggctggcgatgctgcgctcgggatgctcaagcaggatggacgtgttcgcgaggatcacggtgaggggcgtcttcaaatcgtgcgaagcgtcggctacgaaccggcgctgctggcgccatgcgcgatccactggcgccagcgcccaccgcgagaagaacatgctgatcacgaagaacgcagccaacgccgccgcgcccacgcccgccagtgtgacggccagggtctgccagccgcttgcggcgctcatgtccgcgaacgcgaggtacgcggcgcctcccacggtgcgcttctcgtagaacagccctaggccgtccaggctgccggagccgtcgggctgatcggccagcgcggccgcggcctgcgccagcacgtcgtcggcgatggacgccgtagtgcgcgtttgaacagctgccagcgagccgtcggcctccaccgagaacaccgctacgggaatggcgggatccgatccgccgcgcttgccgccgatctcggggggcattccgtttgcacgggcggcgtccgctggcacctgggcgccgggctgggtgccgctcgacgggccgccgcccgcgtcgcctgcgtgggcaagagcagcgtcgagcgtctcgtgcacgcgcgcgacgctctgctggtagtcgatgacgcagatggcggtgaacaccacggccaacaccacggcaacggtggccatgttgagcgcgatgaacttgacgcgcagcttcttcagcatggaaggcccgcgctttccgaggcgtcgtcgggcgcggcatcggccacgaaccggtagcccgcgcgccgcagcgtctcgatgcgcgccgtcgatcccaggaacttcatcttcttgcgcagaaacgacacgtaggcctccacgttgttgtcttcggcgctcgactccacgccccacaccttcgcgatgagcatgtccttcgacaccacctgcccggcgttcgccatgagcaccttggccagcgagaactccttgtagctgaggtgtatggacttcgacccgcacgccaggtcgtagctttccaggttcagcacgaggtcgccggcggccagcttctcgaacagcacttcgccctggcggcgcgtgagcgcgcgcaggtgagccagcagctcggcgggcgcgaacggcttggtcatgtagtcgtcggcgccgctgtcgaggccggtgatcttgtcgggcacggcgtcgcgcgcggtgagcagcagcaccggcacgctgatgcttttgcggcgcagctgggccaccacggcgaagccgtccatcttcggcagcatcacgtcgaggatgatcacgtcgtagtcgccgcattcggcgtaggcgaggccggaggcgccgtcgtgcacgacgtccgtctggtagccgttctcggcgagtatgtgcgccagcgcctgcgccaggcgcacgtcgtcttcaacgatgaggacttgcatggcgacctgctttctttcgcgcgtcctagcttccattgtaccgtcagacctgaaaagcgtctgaaagaaacaggcgaaggcccttttcgcgagcgtgttgcttctgcgcgagcgctcgggcggaggcaggccctttcagggaactttcaggcagcgcggctaggatgcggtgtctgatggaaaggaccggtatcccatgacaacgttcaccgacgtattcgaacgcaaggaagtgaagtaccgcctggacgcgcgccagcaccgcgcgatggcagccgcgttacgcggtcgcatggcgcccgacgcgttcggccggacgcgcatcgtcagccgctacttcgacacgcccgagcgcgcgctcatcgagcggtcgttggacaagccgctgtacaaggagaagctgcgcttgcgcagctacgggtcgccgcaggctggcgaccgcgtgttcgtggagatcaagaagaagtacaagggcatcgtgtacaagcgacgggtgggctgctcgttggctgcggccgaagcctacctgggcggagagtcgtacgagcaggcctgcgcgcgattcccgctgcccgacccggcgatggccgccgagtcgctgtcgccgcgcagcgtgcagatcgcacgcgaggtcgacgagttcattgcgcggtaccggcctctgcggccttcgatgctcatcgagtgcgagcgcgttgcgtacgcgtcgatagcgacgatcgccgcggcggcaggcggcggcgcaaccggcttgcgcgcgctgggcgatgtgccggacgacttgcgcatcaccttcgatgccggcatcgcctacggcgatctgttcgcaagggatgccggtgctgcatcgcatccgctgctccccgacggcgatgccgtgatggagatcaagtcgtccggcccgtttccgctgtggctcgttcgcgcgctcgatgcgtgcgaggcctacccgacgtcgttctcgaagtacggggaagcgtatcgggcctgcatggccgctcatcgcggtgcgtcgtcgtttgcgacagcgcgcgcgtcccaagcagccgccgagcagaaggccgagcggttcgccgcagcgttgcgcggccgccgccctcgtcgcttccgtgcgccgtcgcacacgcctacgcgctgctgaggtgcctggccgttcgatagcccctccctctctacccgaaaggaaccaactgtgctcgatactgcattgacctcgatattcggatcgacggaatcgctcgttgcgggcgtgtccaccgtcgatttcctgctgtgctgcctcgcgtccatcgtgctgggcgcggcggtggcgctcatctacatgttccgccacacgtactcgaagaacttcgtggtgacgctggcgctgctgccgctcatcgtgcagatggtgatcacgctggtgaacggcaacctgggcgcaggcatcgcggtgatgggcgtgttcaacctcgtgcgcttccgttccatccccggcagcgcgaaggacatcggcagcgtgtttctggccatggccatcggcctggccacgggcatgggcttcatcgtgctggccgtgctgttcaccatcatcgtggctatcgtgaacgtgggctacatgctgtcgcccttcggcaagcagaaagagccggagaagacgctgaaaatcaccattcccgacgacttggagtacgacggcgtgttcgacgacgtgctgaagcgctataccgacgagcacgagctgacgatggtgcaaaccaccaacatgggaagcctgtttctactggaatatgcggtgcggatgaagcagccgggaacggagaagcgcatgatcgacgaactgcgctgccgtaacggcaacttgaagatcacctgcgggcgcgctgctgcgagtaaggacgtgttgtaatggaatggacagacgctaagtcgactggcgagggctggggagatacccagtcgctcaaacagtcctcgcttcgctgcggaactcgcttggtgggcatcaccccagccctcttcgttcgattgtctctgttgaaaaaaggagttgtcgatgccctgatagccggactgttcgcagtgatgctgacctgcggattggcggggtgttcgtcggatctggggggcggggggtcggctgctggggcggccgttgatgggggtggggggtcggactcttccgggtctgcttccgactctggcgaggctgcttcgtttgccgaggttgcggcggctttcgacgcgttggcgctcgatctcgactacagcaagcgcgatgcggatgcttcttacgacgatgcttccgccgtgcatatcgtgttgggcggagggtcggcgagcgtagagggcgatggcgcgacagttgacggctctacagtgaccatctctaccgaaggcgtctacgtcgtgtcgggttcgctcgacgacgggcagctggcggtggaagcgcctgaggacgcgaaggtgcagatcgtccttgcgggcgcgaccatccacaacgaggacgggcccgccgtgtacgtgaagcaggccgacaagtgcttcatcacgctggccgacgggacgcagaacgcgctcaccgacggcgcggaatacgtgctcgaagacggctccgacgagccgtacgccacgctgttcagccgtgccgacctcacgttgaacggaacgggagccttgacggtgaccagcgcgtaccgccatgcggtgtgctcgaaggacgaccttgtgatcacgggcggcacctatgtggtgaacgcggtggaagacgcgctgcgcggacgcgactgcgtcaagatcgcggacggcgacttcacgctgatcgcaggcggcgacggcatcaagtcgaacaaggatacgaaagccacgaagggattcgtgtccatcgacggcggcacgttcgtcatcgaggccggcgacgacggcatccatgcgcaaacctacctgcgtatcgcgggtggcgacatctccatcgctgcggtggacgacgcgctgcactccaacctcgagggcctgctggcgggcggcgcgctcgatatcgaagcgggcgacgatgccttccatgccgagacgaagctcgttatcgacgacggcacggtgaacgtgaaggcgtgctacgagggctacgaagctgagaagctgtacatcaacggcggcgacacccatatcgtggccagcgacgacgccatcaatgcggctgccgccgatctcggcgacgacggtgccgacgctgcggccgatgcgtcggccgaggcgcccggctccgagggcgggacgctgcccgacggcatggaggcgcctgaaggtgctcccgacgggatgacgcctccggacggggtgaacggcatggacggcgaggctcccgaactgcccgaaggcgcggagactcccgatgccacgggcggcacgccgccgtccggcgctccgcagcgaaacggcgagggcgccaacgagcgcgagctcaacggcggcgcgcccgacaatgcattcgccgaaggcggcgcgggcggcatgggcatgggcgacgaaaactgcctcatccagatcaacggcggctacaccgtgctcgatgctcaaggggacggcgtggacagcaacggctcggtggagatcacgggcggcgtgctgctggtctgcggccccacgagcaacggcgacggagcgttcgactacgatctgacggcgacggtgaccggcggaacggtgctcatggtgggttccaacggcatggcgcagaacttcaccagcggagagcagcctttcgcgttcgccgcggtcagcggctcggccggccagaacgtggccgtcgtagactccgacggcacggtggtcgcctcgttcacggcggccaagcagttcggcatggtgctggccaccagccccgcgttcgtcgaaggcggcacgtattcgctggtcatcggaggcaccgtgaccggcgcgaacgccgacggctacaccgactccggcacggtggagggcggctccaccaccgagatcgccgcgtcaaccaccgcatccggcggcatgggcggcctcggcgcaggaggcggcggtatgcccgccggccaaggcggcgacgtccagcgcggcatgcgcggcggcgcgggtagcggcttcggcggcggagcggcggcgtagccagcacccgttccagcggcggccccgacggagtgttcgtcgaggtcgccgtttttggcgcgaggtcgtcggtctgcctcctcgattctggcacgaatttacgggtatggcacagattttgcagaaagagtaaggccgtgaatcgcaagcaatagcaaaacgcctggtcgcgaaaacgtctccgcccaatttccccaatcgcttctgcccaacccgtaaatttgtgccagatttttcaaggtcgaaccgttggtagccgattgcatttgtcgttcgcaggtgtgtgaaattcaggaacagctggctctttgtctgcgttatcgcatatcgctggctcatctctagtagtgcgggatttcggaaatcccgtgggttagccttcgaacatcatggcttcgcgcatatctgttgcgtgatcgattcgatgtggtttcgggccaccaccagcaaggcgattatcgccgccgtcgaagatgccatgagcaagacgtaggcctattccgcgataatcttacgatcggaacctgcaagggcgtcgaagcgggcttgcaggttccgaccatgcatccgcatcctgggcttcgcctcatggttccgatctccttgcggaagcgttatcgtccgggaaacagcagccggcgttctgcggccagatcgttcaccgtttctatctgcttggcggtctgacgttggacggcttcgatgaagcgctcgtcaagctgggcgttgagactcaacacgtcagctatgtcatcgaggaacccgtcgagtgaggacgaatcgtaccacgacaggtcctccacgagcgccagctgctgagaaggataggggcgaaacggatgggcctcccacaagtagcgcccatgctccagctcgtccgtggtcgcgcggctgtaaaacccgcatccgttgtcgaacaggggtgccacccgataccgatcgagggtttccacctcgcgcatcaaaccgaaattgtgcgtatggcggtcgaagttcgccataagatggtcggcaacgatcatcttgctcacggcgcgtccgaggttcgacacgcccagcgcttgcccggcttcaaggtatccgcgatggaggtcgcgcccctccgtcactccgaaggcggtaagcacgtcggctgcggggatgagctcggtttcggacgttacgaaggttgggcacgtcgagtaggcgcgcccgtgccgttcggtcagtgagtaggcaacgaagtcttcgtcgtccaggagccgtgcgagcagcttggttgccaacagctcgttgtacggctcgcggttctcgttgcccgttccgcttttcaccaggaggttcgttccgtcgcggtgaatccatgtcttcgacagcatgccaggcgtggcggtgtcgggcgagtgggttatgcgggcggtcgaggttcctgcaggggcagagccgccgagcaaggtttcgcccagtgcttcttcgtaaccgttttcgaagtaattgacgtcatgccagtccacgtcgatatcaacgggcttgaaccaatactgatcggacagattgagtccccaggaatcgaacatgaggtcgatgccatgtcgggctgccagctcgcgcaacacgggggcgaggttcggacgcatatcgggaatggagcgtgaggcgatccatgcagctaaatcgtatcggttcggcgttcgctctcgaaggccgatgcctaatggcttccaggcgattccttcgcgcggcacgatatcggccgtttcgcgcgtgcgtcggttgtacacgaaatcgagcaccggatggttgcgattcatcagcgtgaacggggcgaggttgcgctcgttcttctcgttcatcttcgggcggcctgcggttctgccccgctcggctcgctcgtggacggagcgctcgtcaagcatccaagatcgtccgaaccgctgggcctcgagatctccagacgctataagcgcgttcacgcgcctcatgctgatgcccaaacgctgcgccgcttccttggtcgtgtacatggctcctcccatccgttcatttcctaaaattataccaaacaaagaataaataattctcagatgctgtagaaaaaatattccttaatcggaacattttctggaggtgcctgacggtcgtatggaacacttgcgcggttttgtcccgaaggatttgctcctttcgtcgaatcggtgacccttcgccggaaagcttcgcgcgctttagccgattggagtacaatgggcgaacgaataaggaacgaacccgcacgtcaggctggggccgggcgccatgcaagaagggatgcgaacatggcagacatcaccgaagtggattacatctggaagaacggggagatgatcccctgggccgaggctaccacgcatgtcttgtcccactcgctgcattacggctccggcgtgttcgagggcatccgctgctaccagaatcccgagacgaagaagagctacgtcttccgtctgcgcgaccatatggagcgcctgcatcgcagctgcaagatctctctgatcgacctgccgtactcggtggacgaactgtgcgacgcgacgatcgagcttatccgcaagaacaagctgccgtcgtgctacatccgtccgatcgtgtaccgcggctacggcgtgatgggcgtcgatcccaccggcgcccccaccgacgtggctatcgccgtgtggccgtgggacacctacctgggagacggtgcgctcgacaacggcgtggccgtgggcgtgtcgtcgtggcgccagcgtacgaacaactccattccgcctgcggttaaagccaccgcttcctacatgaactctatcctggctaagctcgaggcgaaagagcacggctatgttgaggccatcatgctgaacgaggcggggctcgtgtgtgagggcaccggcgagaacctcttcgtcgtgcgcgacggcatcttgtccacgccgccgctgtccgacggactgctggagggcatcacgcgcgacacggtgctgtgcctggccgacgacctggagatccccgccatcgaggaaagcctcacgcgcagcgacctctacatcgccgacgaggtgttcatgaccggctccgccgccgagctcacgcccatcggcagcgtcgacggccgtgtggtgggcaagccgggcgagatcactcgcttgctgcaggatcgtttcttcgccgtgtgctatggcaacatcgaagagtactcggaatggctgactgagatctaagtcataggttggtatgtcgcgaagcccccaccgtccgctgcttgcggccggccggagggcttcgctttttgagcgaaggagcgcctctgtgaatcgaatcctcacgtatgacagcacgctgcgagacggagagcagtgcgagggcatcacgttgtcgcttgaggacaagctgcgcattgtcgagcgcttggacgcgttcggcgtcgatttcatcgagggcgggtttccggcatcgaacccgaaagacatcgcgttcttccagcgcgtgcaggagatgccgcttaagcatgcgcgcatcgcggcgttcggctcaacgtgcaagaaggacgtcgccgccgaggacgaccgcgggctggccgacctcgtggccagcggcgccccggtggtcaccatcgtgggcaaaacgtgggacgagcaggtcacgcgcgcgctgctgaccacgctcgacgagaacctgcgcatgatccgcgattccgtggcctacctcaaggcgcagggtctcacggtggtgttcgacgccgaacacttcttcgacggctacaaggcgaacgccgactacgcgatggcctgcgtgcgcgcggcaagcgaggcgggcgccgactccatcgacctatgcgagacgaacggcggcgcgctgcctcacgaggtggatgccgtcgtggccgcggtcgcgcgcgagctgcccggccagcagctgggcatccattgccacaacgattcgggctgcgctgtggcgaactcgcttgccgctgtgcgcgccggcgtaacccaggtgcagggcacggtgaacgggttcggcgaacgcgtgggcaataccgacctgctcaccgtcatcgccgacctcgagctgaagatgggctgcacgtgcgtgggcgaggagcggctgcgcgacctgaccagcgtggcgcagttcgtggccgaaacgtgcaacctgtcggtgccgaaccatcatccctacacgggcgcgtcggcgttcgcgcacaagggcggcctgcacgccagcgccatcgcgcgcttccccgaggcctacgagcacacgcgtcccgaggcggtgggcaacacgcagcgcatgctggtcagcgagctggccggcaaggcatcgctcatcgcgaaggcgaagaacttgggcatcgatctggcccagcaccccgacaagacgcaggagatcctggacgacatcaagcgccgcgaggcggtgggctactcctacgaggtggccgacggctcgcttgcgctgctgctgcaatggcatctcggcgcgtaccggccgcacttcacgctggagagcttccgcgtcatcgtggacgaccacgaggacaccggcgcgctggcgaaggacgccatgtcggaagccaccatcaagatccacgtgggcgaccagcgcttcgtggccacgggcgagggcgcaggccccgtcggcgcgctcgacaacgctctgcgcatggccatcgtggcgttctaccccgaagtggccgacatcgagctggttgactacaaggtgcgcatcctcgacgagaacgtgggcaccgacgccatcacgcgagtcgtcatcaccacgcgagacaagcgcggcagctggggtacggtgggcgtgtcggagaacatcatcgaagcatcatggaatgcgctggtcgactcgatcgagtacggcctgatgcggattggggagtagcatgagcgatctcagaacgcccgaagtcgaagacctcctgcgcgtgttcgcggcgcttgacgacgaagacgtgatcttctccctgctggaggacttgttcaccattcgcgagatcaaggaaacgtcccagcgcctggccgttgcgcgccagttggatgccggcaagtcctactccgccatcgaagaggccaccggcgcgtcggccaccaccatcgcccgcgtgtcgaagtgtctgagctacggtgccggcggctacaacgccgccctgaacgccctagacgacgccgagaagaagcgccgctagcgcggtcgcctgcttccggaatcctgccgcaagctcgattctgcccggttcccgtcacggatcgcctcacgcattcggcaaccaggtgaactcgggccgcgaggccgcgaacaacgtcgcggagttcctgaaggcgtaaacccaccctcttccgaagctggggcgcggaatccctccctccccgccgtcgtcccggcttcggaattctgcatttgggcgcaaacgggcacccatgacaattttgcgagcagaaaagagccccaggcggcggaaggattttctgtcacctggggtttctctagttgctctgcgggggcggccgccgtttcgccctcccggattgtcatgggtgcccgtttgcgcccacgacatgggattgctgcgtcggattgtcatgggtgccgttttgcgtccatgacatggaaccttgcggcgcgcggaatggctcgcgtcacccggcgacgggcgccgcgtcctcgtccggccttgcgggcggtttcgcggcgcttccgtcgctcgacccgctcgccggcagcgccacgggatcgccgtactcgtcgatcgtcccgttcgcacggccctcgatgtaggctgtgcgcgccttgccgcgcctaaacgtcacgggcgccttccccgagctcagctggtagcagtaccagaacacgaacgggatgccgatgatgccgttcgccatgccccaccagtacattacgtcggggctgaaccatgcagccgagttcatgatggtggggaacagcagcgggaagcagctgcgcagcaagaggtgcgcgcccagcgtgtagatgcgcccggtgatgtacagctcgggacggcgcatgatgatggggtacagctcggccgcagccaggatgcagcaggtggacgcgaagaactcgtgtccttcggcgtacacgaagcacgcgttccacgtggtgtacaggaagttccacatggggacggtgtaggacaggatctcgccgtggctggacgtgtcgtacttccagtacttgtcgccgaacggcatggtgacgcacaggatgaagccggccagcgcgttcatcatgttgcccatctgcatgtcgcgcagcgtggcctcggcaatgttgcagaacacgatgccgtacagcgtccagcgcacccagcgtttgcgcatgagccgccagaacggcgtgtccttctgctgcacggcggcgatgcggcccagacctgcgaagatgagcggcaggatgacggagaggtttttcgcccaccggaaccaatcgtctccggggatgttgatgatccatagcggaatggtgacgagcgacaccacccacacccacatggacgttcgatagtgccgtcgcatgaactcggtcagcagcatgagcagaacggtgtacacgaccatcgatatgggagtgatccagacgggcacggtcatgagaaacccctttccccaggtagcgctattattgtcagtctatcatcgggggtggtgccgcttctttcacaaacgacctcttgatgtgaaagacttccacgcccgagcttcgtatactcgcttcaaggcgctgtgcgtcgtcgatgggacgagggccatgtgtccgaactgccgccaggcaacggcgggaaacgagggagcgaagggggcttcatcatgggtattctgtaccaagcggccgacccgctgtactgggtcatttggctgttcattttgttcgcgcttatggcgttcaacgagttgggacgcacgtcgctgtgggcaggcatcgcgctgttcgcggttgttcccatcgtgctgaccgtcttcgtgtggcccatcacggcggctcccggcaacgagtacggcacgggcacgtggttcaactgggtgaagacatattcggcacttgccggctgcttgggcttcatggcgctgcgcttcgtgaagtggcgcggcgcggacggcacgacgcaccacctgtacgagaagcgctgggcgctgtgctttccgccgctcatcctggccgtcaacatcgccgaggccgtcgttcgcgacttccaggtgttcagcttcggcctgtggcaaggcggcgtggtcgagaacctgtggactatgtcgggtccctggaacatcatgaacggcattgccggtatcctcaacatcgtcaccatctgcggctggttcggcatcttcatctcgaaggattcgtcgaaggacatgatctggcccgacatgatctgggcgtggatcatcgcctacgacctgtggaacttcgcctatacgtacaactgcatctccgaccactcggcctacgccggcctcgcgctgctgctggcgtgcactatccccacgttcttcatcaagaagggcgcctggttgcagcatcgcgcgcagacgctggcgctgtggatcatgttcgtgatgaccgttccgcagttcgccgatgtgctggcgcccattcccaccacgcacaaccctacggcgttcttcgcggtcagcttcctggcgcttgcgtcgaacgtggcgttggcggcgtaccagttccgtaagatccgcaagctcaagttgaacccgcttaaggacgagctgtacgccgacacgaagtcgtatcaggagctcgaagaggcaaaccgctagagaaccccgtataatggacgccaagcgtaatcgttgcgcgcggcgtccatgcgcgcctgaacgcaggagggcgcgatgcggctcgacaaagagaatcagggaatccgcccgccggggcgcgagcgttctgcggtcgaaagcaggaggctcggcggcccggcgggcgagatcatgctggcggcgcgcacgttgttcgaacggcgcggggtggggaagaccacggtgaaggacatcgccgccgaggcgaacgtcacgcgcgagctggtgtactactacttcgagaacaagcaagccgtcatcgatgcggtcatcgatgattatgtggaggacctcgtggaaagcgtgctcgtgtggaacgagtcgcgcgtgttcggcgacacggcagggtcgctgcggtcgtgcatcgcggcgtttcgccgtgcactgtacgacgcgaacgggcttcggcccatgattcgcgtgttggaggagctgggcgtgcgcgatgccttcgacgtgcgcgcggtgcgcgagacggtggattgcctgagcggtcgggtgctggtcgaatacgctgagtaccatcaggtggagatcgaattcgtatacgagatgttctgcgtggtgatcttcgggctggtaggcctcgtgaagatcgaccccgacatcagcgacgaggctctcatgaaggtggtggagcagacgctgcacctcgacatggagccgcttgcgctggatgcctcggccaagcggcaggacagcgcatcggtttagacacctcccctgttcttttagatgacgccaaaatcgtgtattcatctgcgactacgttcagcgcgtggagatcgcgtgaccgttacccggtcgtgctatagttgttgcgaattcgttgttcgctgcggtgccgaatcgtcaaaacacgagcatgagagtcaagcatgaggcatacgcggcggattcgaggaggttttgcatgactgatttcacgcgcggcctcgatcgccgcacgtttatatttggcgcggctgccctgggtgcggccacgctgttacggccgacgctcgcttttgccgagcccacgtccgcagacaagttcgccgaggccgattccgttcgcgctcgcatcaacgagatgcaggagcagctgaccatcgccggtgagaactattacaaagcgctcgacgagcacgaagcggccgtccaagccgttgccgacgctcaggcgcgcatcgacgaagcgaacgcccagatcgccgagttgcaggacaagctgagcaagcgggcgcgcagtatgtatcgcagcggccagaccacggcgctcgacgtcatcttgggagccacgacgttcgaggaattcgccacaagctgggatttgctgaacgatatcaacgacaacgatgccgcgatggtgcagcagacgaaagacctgcgcgccgaggtggaggcggcgaagatcgaactcgaaaagcaagagcgtatcgctgccgaaaaagccgaagaggcggcgcgcatcaaagctgaggcagagcagaccatccaaacgctggaagccacgctgcaacagcttgacgccgaggctcaggcgctgctggtccaggaacaggaagcggcacgtgctgccgaagctgccgctgcggcagccgaggtcaagcgcacgtacgcctacagcacgccgagcgcgtccatcccgtcccagggctcggtggtggactacgcgctgtcgcgcatcggctgcccctacgtgtggggtgccgccggtccgaacgaattcgactgctccggattggtgacgtgggcatacgctcaagtgggtatttcggtgccccatcagaccgagtcgatgtactatgccgccgccgcgcgtttgccggtctccgaagcgcaacccggcgatgtgctgtggatcagctacggcgacgggtacaacggacatgctggcatcgcctgcaatgccgggggcacgcactacgttcacgcccccacgtttggcgcgcgcgtgcgcgataccgatccgctgagctgggccgggtttacgcatgcgctccgattcgcataagaaggagaaccaagtgaccacgctgtttgtgaacgcgtgcatgcgcggcgaggcatcgcgcacgctcgcgctgtgccgcgaatacctggagcgcttcgacgacgtcgtggaggttgacgttgcggcgctcgatctcaagccgttcgacgccgatcgtgtggcgtaccgtacggagaagcagagggcaggggagtgggacgatcccattttcagcctatcgcgccagttcgcggaagccgacgacatcgtcatcggtgtgccgtactgggatctttcgtttccggctgcgtttaaaacgtaccttgaacatgtcagcgtgtgcgagttgacgttccattacaccgaggacgcgcgctgcgagggcatctgcaaagcgaagcgcatcacgtacatcaccacgtgcggcggcttcgtagagggtgcaaacttcggttacgagtacatcgttggcatcgccaagatgttcggcattcccgaagtccgcttcgtggcggccgaggggctggacatcgtgggcatcgacatccaggagcagatggacaaggctcgtgcccagatggcgaaactcgattgagcgagtccggcaaaacctatgcagggggaccgacggtttctcgtcggtcccgattttcgcatccagaggggttcgatgacggcttgtccatcatcgcggtatccattatggtgcagcgcgctctcaactgcgtggatcctcgacttgtcgaccacgggttgcgggtggccgcggtgctcgatgccatgctggaagcgaagggcgtgaccgatccaacgcagcgccgcgcagcgtacctcgtggcgttgctgcacgatgtaggcgcctatcgcacggaggaaatcgaccgtatggtggcgtttgaaacggaaagcgtgtgggagcactcgttttacggatatctgttcttcaaagagcttacgccgctcggcgcctatgcggacgtgatcctgtaccaccacctgccttacgatcggttcaccgaccaagatccgtacgtaaaattcctggccggggccgtgcatgtggccgaccgggtggacgtgttgctgctggagcgtcctcaagcggatgtcgtcgaggtagagcgtctgctggctgcatcgcgacctggcgcgttctcgcccgaggcggtcgccctgtttttcgaggcgcagcggcgtttcgacgtgctcgctcgtctgaggagcggtgtgaaacagcctgaccgctcgcatatcgtggacgatccggacggtaccggttcggcgtcttcgttcctcgacatgctcgtgcatgtcatcgattttcgcagccggcataccgtcacccatacggtgaccacggcatgggttgcctatgagttggcgttgcgcctgatcggcgaccagcgcgcggctgctcgcgtgtacacgagcgcgcttgtgcacgatgtgggcaaaatcggcattccgctgtccattttggagaagccggggaagctcgatgacgaggaaatgaaggtcatgcggacgcacgtggagctgaccgaggatattctcgagggttgcatagagcccgtgctgttgcaggcggctgcccgccatcacgagaaactcgacggatcgggatatccgcgcggtcttcatgcggctgaattgtccatgcccgaccgcatcatagccgtggccgacatcgtgagcgcgcttgtgggcacgcgtagctacaagaaggcgtatcctaaggagaaggtgctcgagctgctggcctggcacgtcgagaccggcaagatcgattgcatcgtggtcgagaccatgacgcgcgactacgatgccatcatgttgtcggtcgccgcagcgtgccagccagtggctgccgcgtatgagcgcgtgcagagcgcttatgcgctgatgctgggaaaactgaaaaggtggcaagctgaaaacgaggggagaagcgcatgaagcgcctgttgatcgtagtggactatcagaacgatttcgtggacggatcgctgggctttcccggtgccgagcttctggaggagcccatagccgcgaaaatcgaagagtaccgcagcgcggccgacgtgatcgcgttcacgttcgacacacatcgttgcgactatttggaaacccaggaagggcgcaacctgccggtggagcactgcatcgagggcgcgcccggacacgcgctgtacgggcgcatcgccgagctcatccgtccgacggacgaggtgttcgagaagccttcgttcggttcggcagacttgttcgaatggttgcgcgcagcgcagccgccgttcaagagcatcgagctggtgggcctcgtgtccaacatctgcgtgatctcgaacgccgtgctggcgaaagcggcctgccccgaggtgcccgtcatcgtggacgccgcctgcaccgcttcgttcgacgactccctcaacgagaaggccctcgacgtgctggagggcctgcaggtccaagtgaccaaccgggtttcggcggcctagcggcctgttgaaggcctgagcccggttcggctagcggcggcgggcgaaggcttccagcacgagctgggcgcgggtgccgatgggggtttcgttctccgcgaggaaacgggggacgtcggcgatgggcagcaagaacggctcgatgaactccgccggctcaggctgcgcgtcggccaccttctccacctgggcgaacacgacgtgcacggtttcgtcggtgaggccggtggacgagtaacccgcttgcggcagcgggtcgagcgcgggcgcgtcggcgtcggcataggcgcgcagggcgtagcccgtctcttcgcgcagttcgcggtcgacgcaggttgcgaggtcctcgcccggctccatgaggccggccgggaacgcgatgcaccagctgttcagcggatagcggaactcgcggatgagcagcagctcgcccgtggcggtttgcggcacgatgcacacggcgtcggccgcgcacgcccgacctacggcattgccttccagctcggcgcggtaggcttcgaggctcttgcgcgacgcgctttcgtattcgtacgtcgagccgtcgggcatagtgtaggccagcatgtacttcttgatccatccgtcggaaacctggcggatgttggaaagctggggaacggcttgcatgggaaagctcctgttcttgggtgctgataggcggcgcgcgagcgcttacaagtcgaagacctcgccgacgttggcggcgatgcagaggtcggcttggcggtcgcgcggggtgggggtgtggttgacgatgacgaggcggcgccctgtgaagaagtcgatgaggccggccgccgggtacacggccagcgacgttcccgccaccaccagcaggtcggcctgcgcgatggcattcacggcgccgtgcaccgtgcgttcgttcaggggctcctcgtacagcacgacgtcgggtttgacgatgccgccgcaggcggggcatcgcggcacgctgtcgtcggactgcgcgcgaagggccagcaggttgtctaccgagtaggctgcgccgcacgccatgcagaagttgcgcagcacgctgccgtgcagttcgagcacgttcttgctgcccgctttttgatggaggccgtcgatgttctgcgtcaccacggcggccagcgtgcccgcttgctcgagttcggccagcttgcgatgcgtgcggttcggctgcgcgtcgagcgccagcatgcggtcgcagtagaagtcgaagaacgcgctggggttggcgtcgaagaagctgcggctgaccatctgctcgggaggataggggtacttctgcgcgtacaggccgtccgggctgcggaaatcggggatgccgctctcggtggacacgcctgcgccgccgaagaacaccaggccgcccggcggcgtgtcggccacccagctgcggaacgtttcgatagcgcgcacggtttcgtccatagctcctcctgtcggtttcgacccatgataccacgcttcttgcgtccggatgtttcacgtgaaacatgcgttctgatcggcctgttttgctcttgaacgcctgtcatcccgagcgcagacgacgaagcgtgcctttgggtgaaaacaaggaaggcggccacggtggccgccttccggtgcgcttgcgtttcgcgaaggattaaccctcgatggagatggtcttcttctcctcgagcttgggctgctcctgcttcttcggcacggcgatcttcagcacgccgtcctcgaacttcgccttgatgtcgtcttcctcgatgtcgtcgcccacgtagaacgtgcggctgcacttgccgctgaagcgctccttgcggacgtacgtgccctcttcgtccttgtcctcggactcggactgggtctgcgccgtgatggcgaggtagccgtccttcagctcggcctggacgtcgtccttcttgaagcccggcaggtcgatggtcagctcgaatcctgcgtcggtctccttgatgtcggtgcgcatgagcgtgggcgacatcttctgcatgggagccgaggcggcgttgaagaacgcgtcgaaggggtcggtcatcagctcgctcaacaggttgcggttcctgcgcatgggtaccatcattgccatgttcgatcatctcctctagtcgtgcggggaggcggtggttccgggtgcgccgaaacgccgccttgcttggtatgcctggtattctacgacgcgttttagcactctacaaccgagagtgctaaatggttactttttcgttatgtaggagcgggggcttgccgcgcggccgtcctcttcggtggcgcctaagacgaggtccatcatctcctgacgattgccgatgccgagtttcgcgtagatgtgggcgatgtgcgttttcaccgtgttctcggcaagcaccagttcttcctggatgagggttcgcgttcttccctgagcgaggaggatgaatatctccgtttcgcggggcgaaagcttgttcgcgactgcgatgtcttcgcatcgaaccgcgatggcgcgtgatacgtgctctcccgtgagatcgccgcttgaagggtgcgcagtcgtgggttcgggattgcccgctgcgctttccttctccgtcgactccaggcgccttgccccgatccattcgctgagaatggcggcgatcgtgagggagtacgcggcgcccagcatgatcatgctgctgaaagccactccgctgcccagcaaggcgacccacagcacggagctgagcgcgtagacggctgctgcaacgcccatcactcggtacgagggcatggtgagcgcatcgatggcggtgaccacgacgatccagaacagcacgtgcgcacacgagtcgtccagccgcatgagggcgtccagcagagcggcgggtatcccaggggcggcgttttgggacaccacgagaaacagaccgccgatgacgatgatgaacgctggctgaaacctcaaatcgaggcgccatccggttgtcttcaccagtgtggcgagtgcgaagagggcaagaaacgctgttgagacgagggagaagacgacctctgccgcgatcccttgcgctgcgacggcctcgctgccccataatccgatcgaactgaacgaccgtacggtcgcaagtagcagcgcagctgcagcgataagcaccagcaggcttcttcgaccctctcttcccgccggcagcacggcgcgccgaggttgagccgcgagcgcttccatccttgctccggggaggtcggcgcgccgggttatattctgggcggattcggtaggcgcagagctccgggcggctttgaatagcgcggcggaaacgagcggcagcgcgatggtgacggcgatctgccagacgggaggcaccgcatagcgggcgatgggaagcacgagcgtttccatacccaatgccgccacgatgcaccaagcggtgcaggcgaaagtctgcgttctggctagcagcaaatagaatcgcgaggcgatccagaaatagcccgcgccgaacatgatcaggccggcgatggcaaggaaaatagggtcgaagaggctttgattggaggcgagggcgaaactcgcggtgcctatcgaggatgcaagcggtagaacgtaggagaaaggttggtcgcgttcgcggagccatcgggggcctactgcgaacgcaactcccacgatgagtatgcccagcaggaagaagatacgcggattgacggcgggatcgaggtcgtgcagggaggaggggaaccctccggtatgcccggccagcgtgcaccagagcaggttcgtgcttagtcccaaggaggcaagaactgcgctgcggttgacgcgcacgccggcgggtgtttccatgatcgatccccctgtttctcttcccggcgcggttgcgagcagatattcgaaagtcctctgaacagctggccattatatacgattctcacgataggcgaaaacccggcgcgcctctatcaaccaaaccgggggatacccgttcgagcccttcgtcatattcacccggatacgtcgatggcggtggacatcccgtgcttctaccatcttccgggtgtgcggcgtgcgcgcctgttccaggttggaaggaggggcaagcgataaggcggaactgccgcacgcacgacaagagaggatggaggagagatcatgagaaacatgcgactgaaggccgcgcttggaatggcgggggtgttggcgatgactgcagcttgctgcgtggttggtccggcgcttgcggccgattctgcgtcgactgcagacgaaatagtgcgcggaggggagccggacggcgatgttcagtatcccggcaaagagtacatcgtcgagaattacgacaagtgggacaagatcgccgaggagtacgcgcccgagatcatccgatattcgaacgggcagctggttcagcgtaccccgaccgagtacgagtgcccccattggatgcagcaaagctggaccatttcgtacaacacgtactacctcgacgcggacaaccgagggtgcaattcgtgccatgctgatatgaatgcgatgatcgagaacatggagtacaagcatgccacgatcgacaacaaagcgctcgagacgtacagcgacgtgaaccagtgcatctcgtgccatcgtgacaacggcgacgatttcggccgcctcatacatgccatccactacaacgagcgcagcgggaacaagttcgccgagggctcgaacggcacgtgtcaatcgtgtcacgacgcgactgcggatggcaacggcatgcagctgtgggacaacgtgaagcatgaggcgctgcaaggcatcaacaaggttgaaaacgtgcagggcgagttcgcatccacccaggacaaggtgcagacgcaagacgagctgtacagctacgacttcgttcacggctattacgaccatatgcgttacgcatgcgggcctaacgggcttgacatcgacctgccccagagcatgttcgacgagtgggagttcacggtcgacgggaacgtgaacgcgccctacacgaagaagctgcccgagctggtggccgaagctgaagccgctggcgtggtggtcacgaagccctcgaagatggtgtgcgagctgaatccgatcggcggcggcggaatcggccaggccgagatcaccggtatcccggtcagctggctcatcgagaaggctggcggctacaccgaagacaccaacagcgtgcgcgtcattcgcgcagacgggtcttcgcgcagcgggttcgacctctcggtcttggacaaagggtatctggtgtacaagatcgatggcgaatacctcagcgcacgtcacggcttcccggtcatgcattggcaggagacctacgatgcccagatcttctcgaagcagatcaacggctaccacgtgtcgtccgatgtcatgaaagagcgtgtgtgcggccaggtcaaccaagaggatgcccatgtgaaccgtcccaacgtgacggtgtgcggcgtgcccgaaggtctcatcatccagaacggcaagccgttcacgttcaacggctatgccgacgcgttcgaccatcccatgaagacggtggaattctccatggacggcggcgagacgtggacgtcgttcgacgtgggagacgtcgatccggcgaaatggctgtggtggagcttcacgttcacgcccgagaaagaaggagcgtacgtgctgagcgtgcgcggcacggacgtcgacggcgaagtgagctaccgcaaccacgaggtgctggtgaacgcgaaggacgagatgccgtccgaagacgagatcaccgagatagggaagatcgtcgatccggccatggccaacggcgatgcttccggcgatcagcagtaagcgaggatgatagacatgacgcaacgaaatacccgaatgttcgccggtgttgccggagctgcgctgctgctcaccgggtcgggcttggcgctgaacgctttgaatccgaacagcgccgatgcatccgatgcggcgagcgggatgacgcactcgttcaacgagaacgtggttgaggcttcgtgggtgaacgtcgacgacggctcgtacgtacgggtgccgaacgtgcagggaagctttgtattcaaccaattgggaacgaccccgaacgacgagctgttcaacgtattcggtgctgctttgacctcgatgtgctctaaacctgcggtcgagctcgaagcgcagacgggcggcgtggccaatttctacgtgaacgtagggggtcatatcaagaagaacttcacggtggatgtaagcgagttgtccgaagatgccagcgaggaggcgctcatggcgtgctcgtgcgctaccggctctccgttcggacaggctgcggtgctcggcgtgccgctggcgtccatcgtggaaatggccgatttggaggaaggcgtgaacaccgtgacggcgtacggcgccgacgggttcggccagcctttgccgctgcgctacgctttggagcatgatgcgatgctcgtctaccaggtgaacggccaggagcttacgtcggcgacggacggttccagcatgcagctgtggatgcccgagacggtagcgcggtacttcacgcgcaacatcaccgacatcgagctgacgcgcgaagacgtcgaacccgatgtgcagcaggtcgatccgtgctaccgcaacaagatcaacatcatgaactacgccggcggatgcacgttcgtcgcaggcgacgagatcacgttcgagggcgttgccgacgatctgggaagcccgatcgaggctatcgagttttcgttcgacggcggcgctacttggacgtcgtgcgcgaccgagggagcaaccgcggacaaatgggtgaattggcagttctccacttcgttcgaggatgcaggagactatcgtatgacggtgcgtgccaaaactgcagacggcatggtttcgccgcttgcggcgacgctgttgttccaggtctcgtaagagggcttatcggagggcgcgcaatccgggcgcgccctctttttcgggcgtccgcttgcagtttggcaatggttttatgggtcgcgtgaaggccggcgtatgatctatacttgccattcgatcggttgatgcaaggaaggagcttgtcatgaccgttatcggcctcatatccgacacgcatggacggttgcccgacgaggcgctcgcggccatggcggacgttgaccatatcatccatgcgggcgacatcggcggccccgagatcctgcatgcgctcgaggcgttggcgccgaccacggcggtgctgggcaacaacgacttcgacgagtacggctcgcgcgtgggccgtttcgcgcatccggtgatcgacggggtgcgcttcctcgtggcgcactatccgcgcgacgtgcaaatcgggttcaacggctgcgcgggtctggcggcgggcgatcccatcccgcaggtgtgcgtccacgggcacacgcatgttcccgagctggtgtacggacccgaggcgcgtccggcatcgtacgtcgtctgccccggcgcgccgttccggcctcgcggcgggtttccgaagtgcacgggtcgcatgctggtggatgatgggcgcgtgctgggcgtgcgcatcgcgtcgttggacgggcagaccgtgttcgaggtgggcgagggcgcgtaaagcaaaagcccggtgcattccatacgcattgtcgctgaaagcctcgttttcaggcgcgattccgcggctttcgggcgacaatgcgtgagagccatccatgttttcttgcaaacgagtgctttaagcgggacatcgaggaaagctgccggggatgcgaacgggcgcccggcaggggcgcccgttcaggggagggagggaatgtcgaacgcgctgtcagctggcgagcgccgtgctcggggctgctgctcgatggtgcagcagcgcgcgccgcatgcgcagcacaacgtaggcgcccactgccacagagtacacgaccaagctgacggtggccgtctcgcgccctgcaaatgcggaaggcgctagcagcaatacgaggtgcacgtacgtgagcaggtagaacgggtaggcgagacgttgcacccctttccagcgcgcggcgctcatgcggcgcttcaccacctggaacgaggtgaccagcaggatggccatcagaagaaccagcaatgccgccagcgctagcgagaacccaaggttcccattaagcgccgagcccagccgcggtacgtacgacaccccgtaaaacgccaggtgacccagcgcgaagatgcagccaaggatggagagctggcggcggatgggcatgagccgcgcccgcaacggcgagctctcgtcgagcacgcccacgaacatcacgatggtgaacagcacgaacgcaagcgcgcatcgctgcataagcggcatgaagtacggccacatcccgcccgcagtgttcgtggtcgttccgaaccagtacaagcccaccagcgcaagcgcgacgatgtagaagggtacgggatgtcgcttcagcggtttcgcaagaatcccgataaggacgatgcagcaaacaagcgcgatcaagaacctcataccagcccccttctgtagtcgcaatattgtcatagtatcatagtataggctgaacagccttgacgatcttgcgtagagtacactcgggttctattcgatatattatccttaaactagatgcatttgaacaggtattttgcgttgactgtcatatatcatggtgatagtatgaccgcaatagctatcatactaggatatgacggttatgctcatgcatgggtcgacggtgaattgttgggggacaatctcggacgggcttgtttcccgaatgcgatctagagggggttacgcgtggataccacattgacacggcgaagtttcgtaaagtggggaaccgcaacggttggtgcaacagcgcttgttggatttaccggatgcgcacccggcggcggcaaggccgaagatgcttccgaggggactcagcagaaagcgggcgagtggctcaacgctccttgttacaacaactgcagctgcggctcttctcgctgtctgaaccgggtgtacgtcgaggacggcgtcccattgaaaattcgcaccgacgaggaatcggaagacatgttcgccatgccgcagcgccgttcttgcttgcgtggtcgtgcaaaaatcagtgaggtgctctcgccggctcgcatcaagtacccaatgaagcgcaagaatttccgcttggacaatcctcaaggagagctacgcggcaaggacgagtgggagcgtatcagctgggatgaagcacttgatctcgtggccgagggcatcaaaaagatgtacgaccagtacggtccgacgggcatactctgtggcgcgtccagcaacatcggcgacgggtactacgatcagaacgtgtgcctgctgaacgccctgggaggctcggtgcatgcggaagctggcacggtgtctttcggctcctggtcggttgttgacacccatatgatcggtggcttcggcatgtccaacacgccgcatcacctgcagttgatcaccagcgacctccatgtgctgttcggatgcaactgggcggccaacaaggccggcaatcacgcgttatatctggaagaatgccgcaagcgcggcgccaaggtcatcgtcatcgatccgtggctgagccaaacctcacagatggttgctgacgaatggattcccattctgcccggctcggatacggcgctggtcatcgccatttgctacgagtggatcaacgcaggaacgtacgatcaagaatttctcgatacgtactgcatcggattcgacggcgatcatatgcccgaaggtgcccctgaaaacgcctcttggaaagattacgtcatgggcaccgggtacgatatgacgccgaaaacccctgaatgggccgagaagatctgcggcgtgcccgctgataccattcgctcgcttgccgccgaaatcgcgtcggtggacaaggttgatttcaactgcgcgtagtccgcatccaagattcccgcgggcgagcagttcgtccagagcttctacacgatggcactcatgcacggcggcatcggcaccccggggcattacttcggctggtcgggcgtgaaggaattcatgagcagcggcatcagcacgggcgcctattgcccggtcaccgccgaccctgccaaccccttggctcctgcgggctcgccggtgtacatgtactatcccatcccgtccttcccgacgctggaagaccctgatagttggctgaatttggagccttcggaatgctggcgttctattctctccggagaatacggtcgcgattgctggccgacgggaaagcgtaaggtcgacattcacgcagcctacttcggcggccatatgagcaccttgaaccagatccccgacaccatgaacggcatcaaagcagttcgtgcgatggatttcgtctggggtgtcaacccgttcttcgactcgacgcgccagtactgcgacgtgctgcttccctgcgcgacgttctgggagaagcccaacaaggcgttcggtggagattacgcttccgcgctgtggttcgacaagatcatcgatcctctgtacgaggcgaaatgcgaaagctggatcgccgaggaattggcaacgcgcttggggctcgaccctaaggtggtcaacaccttgagcgatgctgagcgtacgtacgcgaccgtgcgcgatgcaacctacatggacggcacgacgttcgagtcttcgacgcttctgaccatcaagcaggaagaaatcgaccagttcttccccggcgtcgaaggcaccccccaagagggtaagttcacgttccaggaattccgcgagaagggcatcttgaaggcggagctttccgaggatatgttcattcccgagccctatatggcctttatagccgatccggaaggaagtccgctcaagacggcttccggcaagttcgagatctactgcgagacggctgcctacatgatcaactcggtgggttactctaccatcgcccccatcggcatgtaccagatcggcgaccccgagcagggtgccggtacgcagaccgacgagtacccgctgctgctttggacgcctcactcgctgcgtcgtgctcactcggtgaacgacaatgtggtgtccttgcgcgaagcatttccccaagaatgtttcatcagtgaggttgatgccagggagcgcgacatcaagaacggtgataccgtgctgatgaccagccctcacggaaaggtgctgcgtccggcgaaggtgatcccgacgctggtgccgggtgcggttgccatccaggatggtgcttggttccagatcgacgaagaaacgggaatcgatctgggaggatgcccgaatgtgttgcaggctccgaaatcgtcgggtggaggatgccaagcgtggacgggtacgttggtgcaggtggagaagtatacaggcgatctgacactcgaacctgacaagaatcggccgatcgtcatgccggttggcgtggaataagggaggtgcatcatggctcagtacgcgtttcactttgattccaacaaatgcaccggctgcaagacatgccaggtggcgtgcaaagaaacctacaagctgccggtgaacaacctgtaccgcaaggtgctcaactaccagggcggcacctgggaactcaacgaagcgggcagctacgtgcccaacggcgtgttcggctacttcgtctccatggcgtgcaaccactgcgtcgatccggcgtgcgtggcgaactgtccgacgggcgccatgcagaaggacgaggaaaccggcatcgtgtggaccgatcacgaggtgtgcatcggctgcaagacgtgccagaccgtgtgcccttacgatgcgccgacgtacgacgacgaagcgggctacatgttgaagtgcgacatgtgcaaggccgagctggaagcgggcgggagcaagcccctctgcgtcaccggctgccctatgcgcgcgctcgatttcggcacgcgcgaggacatgatcgcgaagtacggcgagggcgacgtcgaggtggagcccctgccgaaggacacgactcatccgaacctcatcatgaacccgcatcgcgatgcccagaagtcgggcagcggcaccggcgcgctcgtgaacctggaagaggagatctaacggcatcaggctgggcggccgcttcgtcggccgtccagctgtttcggaggggaaaggggaaacgatgaacgcaccgtacaaccaggacgtgcttgcggctgcggaggcgtgcttcgcgcaggcgtcccagctgctgtactgcgagccggatgccgaggtcgtcgccgaccaggtggcggagcggccgttccagaacgcgccgttcggcatggacgatgccgatgtgcgcgaaggcatggcgctgatggacgcttggtgcgtcgccgccgcggctgacgaagcgggcttcgacgaacgcgtggccgcgcttcggcgcgagtggctgcggctgttcgtgggtgccggaacgcccgatgcgcccagctgggagtcgttctaccgcgatccgaacagccagctgttcagcgcgcgcacgctggaagtgcgcgagcggtaccgtcgccacgggttgcagatcgagcggctgtatgcggagcccgatgaccatctggggctcatgctgggtttcgtcggccatctgatcgggctcgaagccgaggccctcgcggtcggcgacggtgcggcggcgggcgaagcggccgacgagcaggagtcgttcctggtcgagcacgtgctgccctggcttgcggcctggcgctacagcgtcgatgcgcatgcgtcgtccgactacttccgcggggcaggcgcgttcgtgttcgggctgtgcgcgcgctacgcacagcgcttcggcgtggcgttcgaccgcgaagggcaggtgttcaagcggaagtagctaggcatcgggcggtcgaagccctatcatgaactgagcgtctggcgagagggggacgagatgctcgggacgcttgtggtgctgtacctgttcctaggaggatgcggagccggcgttatgttcgtgacggcggcctggtcgcttgcgtttcaccggacgcgcacgcgcacgcaggagcaaacggcggcgttcggcgatttgaaggcccggtgctacggcatcgggttcgtcatgctgtgcttggcggcgctgtgcctgctgctcgatctggggcgccccgagttggcgttcttgctgttcacgcggcctacgctgtctatactgtcgttcggctcgttcacgctgctggccagcatcctggtcagcgggtttctggcggtggcgaacctcatgtacgtgccgttcgtccgtgccggggcgcgcaaggcggccgaagcggcgtgcttggcggtgtcgctgtgcatgatggcgtacaccggcgtgtacgtggggtggatcgaggcggttgcgctgtggaacaacgcggccacgcctgcgctgttcgcgttgtcgtcgctgtcggcgggcgtctcgacggtgttcgtgatcgcgccgttcgtgcgcgatgtgacgcgcttgagcggatggatgctgctgctccatcgcgtccatctggcggtgctggtgctggagttggtgatgctggcggggttcgtggcgttcgggttctccaaccccttcgcgcgcgaatcgctggcgatcctgttcgacccgagcgggctgggcccgtggttcgtcgtggggctggtgggcttggggctgttggttcccttggccgtcgaagtgttcgtcacggtgacgaagcggttggttcgcgcgctgccggtggacctgctgtgcatcgcgggagggctggtgctgcgattctgcgttgtttggtcggggatgcattgaagatgcgcggttgccgccgctgtacaagctggttatcttgtacaatgcggaacggatgatccctcagaaagaataaggaagtggcatggcgttattcgagatagacgagtcgtcggggctgcccgtgtgggtgcagctgcgcaaccggttcgtctacttgatcaagaccggccactaccagcccggggatcagctgcccagcgtccgcacgtttgccgccgaagccgccatcaactacaacacggtgagcaaggtgtacatcaacctcgagcacgacgggtatgtggaatcggttcgaggccgcggcgtgttcgtccgcgatatcggcaagctggccgccgacgacgtgcagtccatcgccgatacggaaatcgaggagagcatcaagcggtgcctcgcgttgggcatgacgcttgatgaaatcatgttgaggatgatcgacgtcgcccatcgcgtccagcaggacgtggaagggggcgcgagcatgagacggggcttgtatgaaaaatcgcaaaggaaagaatcaaactgacgcgccggccgccaagccgttttccatcgagcagtacaactcgcgcaccgatcggcgcacgtcgcagaacggctcgctcatgttctcggcgttcgtgttcgttgtggcgctcgtgctggccatcgcggcgggctacctgatcacaggagccttcaccgtgtgggtggtgctggtcggtttcgcgctggcatgccttgccgagatgtccatccacatcgccatgcagtgggagaaggtggtggtgctgcggttcggcaagttcagccgttcgaagggccccggcctgtacttcaccatccccttcatcgagcagactgccctcaaggctgaccagcgcatcatggtcaccgggttcggcgccgaggagacgctgaccagcgacctcgttcccatcaacgtggacgccgtgctgttctggatggtgtgggacgccgaaaaggcgtgtctcgaggtggagaactactacaactccgtgtcgctggtggcgcagaccgcgctgcgcgacgccatcggccgcgccagcgtgtcggaggtggccatccgccgcaaccagctggatcaggagttgcaggaggtcatcgaagagcgcacgtcgctatggggcatcaccgtgctgtcggtggagatccgcgacatcgtgattccccaggagctgcaagaggtcatgtccaccgaggcccaggccgagcgcgagaagaacgcccgcatggtgttggccgaggtggagaaggacatctcctccatgttggtggacgccgcgcacgtgtacgaggagaacgaggtggccctgcgcctgcgcacgatgcacctgctgtacgagagtgtgaagggttccggcggcaccgtggtcatcccgagcgcctacagcgaaggcttcagcgacgccgccctgaagaacatggccgactccctgaaaaccccgaagtagagcaccgcagcgcgttgttgcagaggcattatcggcccaaagacacggttttcgcgcgaattccttgtctttgggccgataatgtttgcgggaatacgcacggcggaatctcgcttctagcaattcacctgggtgagttcgccggtgtcggaatccatgatgaagccgatcacgcgcacgtggggcggcatgacggggtggttcgccaccatgtcgacgctcttgcgcacggcttcctcggtgtcgccgaagccggccagccatttgtcgaagtcgatgccgcagtgccgcgcgaactcgatgcgttcggccgacaccccgaggcgctccatgttcgccaccatctccttgccgctcatgtgctgcgcgccgcagttcgtgtgggccacgatcatgatgtcctccacgcccagctcgcacaccgcgatcagcagcgagcgcatgacgctgccgaaggggtgtgccacctcggcgccggctaccttgatgatcttcgcgtcgccgttcttcagccctagcgccgccagcagcagcgcggtgaggcgcgtgtccatgcacgagacgatggccagcttcttgtcggggtacttgtcggtggcgtagcgctcgaattcgcggcgctccacgaacgcgcggttgtgcgcgagtatgccgtcgatggtgggggagatgttcgcctgctgctgatccataagagccttctttcatccgaagcccctatgatagcgcaacccgctctcacgcaatgtgcgaacgaatgtttcacgtgaaacattcgatgaagacggaggccgcagacgtggaaacggccgcccgagggcggccgtttctggcagatggaaaagcttggtgcgtcggtttagaacgcgcggaaggaggccttcgggcagaagcagatggggcacttctcgaagttctcgcccttgtggatgtaaccgcagatggggcacaggtagaacttgtcgtcgtcgggagcgtcgatgtcgttgtacgccgccaggtagcgctcggcgtgcacggactcggccagcttggcgcgggtgaacacctgcacggccttggtgttgccctcttcctgagccttcttgatgaaggccgggtacatgtcggacgtctcgaagatctcgccctgagcgcccatgatgaggttcaggtcggtctgcacgccctcggcctcaggggcggccggcttctcgaagtcgggctcgacttcggcgacgagcgcgtactcgaggccgatgtggatctgctcggcagcggacgtggcctcgaacaggcgagcgatctgctcgtagccctgctccttggcggcctgggcgaacgcggcgtacttggcggaagcgccggtctcgccgccgatggcggccttcaggttctcgagcgtggtgccgactttgcaggtgccgaagccgtccatgttcgtggtgttctcggcggtggggatctcggaacgtaccttcatgggtgatactccttctcgtcttacgttttcgtctgtgccctcttaatgagaatcaatctcaataagtagaatactccgaagccgaacgagacgcaagggggtaatcgatggccgtcgggtatttcgcgaaacgtccacaaagcggcttcttccgcgccgcaccttccttacggctccacgatgttgaagaagaagtcgaatgccgtcaggtgttcggtgagcttggttatgacgtcctgatccccttcgacggcgatcgaagcggcttgcgtgtcggcgtcgcggttgagaatggcgaacatgcccaggcgcggcatcgtgagcgttgcgtcggcgtcggccgcctgcgtttcccgctcgtacagcacgacgcccgagcgcacggtcagaaggtacgggtcctcgtcggtgaacgccaggtttacggtgaggttcaggttctcggcggcgttcgcgtccaacaggatgcccaggtagtccagcatcatggagggcgtcatggcgcgctggatgtccgagctgccggtcgcgcggtacttcggatcggcgtccacgccgtcgcgcagctccttcgcgccggtgaggtaggcgttgcgccaggggcccgattccgcctggaagcccagctgctccagcgcgtcggcgcacagcaggcgggcggcacggttgccggggtcggcgaacaccacgaggttcgtcacctcggcaacccattggtatgcgccctcttcgaagtccttcgcggctttcgccagcaccgcgtccacgtcgccgaagtattccacgaacttcctggccgactccgccgggggcagggcggccagatgcacgggattcgcgtcgtaccagcccatgtacttctggtatacggccttcgcgttgtgcgacaccgtgccgtagtactggcgcgtgtaccagttcttttccagcgccgcgggcagcgcgatcatgcgggctatctcgttggacgtgtagccttggttcacgtacatcagcgtttgatcggcgatgaacttgtacatggcggcggtgttcgtgagatagtcgcgtatgaagtccgcgccccaatgcggccagttgtgcgcctggaacgtcacctgggcctcgctgccgtagcgcgcgagcgtttccatgaggtagttcgcccaggcgttgccgtcgcgcacctccgcgccgcgcagggtgtacaggttgtgcagcgtggccgtgcagttctcggcaacccacagcgcccggtagccggggaaccacgtgttcatctcggcgggagcttcggtgccgggcgtcatctggaactccatggtcacgccgtcgacggtgcgcgtctcgcccgtcgtcgtgacgatatcgttcggcgcgaggtaggagacggtgcccgtggactgccccatgccgatgccgatggacagcttgccggtgggcgaggcttccaggaacgtgccgtactggtagcccgcgcggcgccccatggcgttgccagcgtacacgttctcggccacggcatgctcggcgaagccctgcggcacgatgatggggatggagcgctcggcgacctcctcttcggacacgatgcccttgatgccgccgtagtggtccacgtgggggtggctcatcacgatgcccatcaccgggcgctcgcccaggttgtcggtgaccagctggaacgcggcgcgcgagcactcgcagctcatcagcggatcgaacacgatccagcccgtgtcgccgcggacgaaggtgatgttcgtcatgtcgtagccgcgcacctgatagatgccgtccacgacttcgaacaggccgaagaggtggttgatctgggcgttgcgccagaggctggggttggcggtgtcgggcgcatcggcgggggcgtcggcgccgtcgaggaacgcgtaggccttctggctccacaccaccttgccgtcttcgccggtgatctccagcgtatcgggtgcggcgatgagcccgcgctcggcgaattcgcgctcggtttcgtcggagaagtcgagcagggcgtacacgccctcgttggccgccgcggttgccggcgcggccggtttcgcgtcggctttcaggttgtcgagcgcggctttgccggcggccgcgtcgtcaccggttccggctcctgcggcagcgcagccgcacagggcgcttcccgcagccacgagcgcgccggtggcgaacgccccggtcacgaacgtgcgcctgtcaagtgcatgatgatggcgggtcatagggcccctcccctttcctcgcagagtctctcggttcgcagcaatggagcactatcacgatacgcgcatcgaaacagcgaaaacatcggccggtacgagggttttcccgaagttcccccgatcgcttttgctatgctgagcacgatcgaggctccgtacgcgaagaaagacgggtcgaacccatggaccaagaagcccccatcgacagctcgctcatgctgagcgagaagttcacgcccgcggcgctgcccgaggtgtgcgcgccgcgccgcagcctcatcggccggttcgacgacgcggccgccctgcggttcggctacgtgggggctccggcgggcagcggcaagaccgtttcgacgctgctgtggctgaaagcgtgcaagcgcaaggtggtgtggatcggcctcgatcgctacgacaacgcgcccaccgtgttcttcaaactgctggccacgggcctgctgtcggtgcagccggagaacgtgggcatgcgccgcgtcctcgcgagcccgtcgttttccgcgtcgcccgtcgagcacgtcatcatgatgctggccgagatgcagccgccaaccgagcgctacgcgctcgtgctggacgacgtgcacctcgtcacgaaccgcgagatcatgaaggcgttgccggccgtgctcaagcggctgcccggggcgttcgcggtgtttctgctgtcccgcaacgagctgcccgatgagttgcgcggcgtcgtgcgcgagccggcccagctcatcggggccgaccagctgcgcttcaccgaggacgagatccggcgctatttcaaaagcctggggcgcgccctcacggccgaggagacgcgcttcgccttcgcggcgacggagggctgggccatcggcgtggccgcggtggcgaagacgggcaagatcgactccggcagcagccactacctgttcgccagctacttcgagtcgcaggtgtggaacgcgtgggatcctgacctgcgggaattctgcctgcgcacgtcggcggtggacgagttcgacccggagctcgctcggctgctgacggggcgtcccgacgcccgcgccgtcatggacgagctcaaccgtacgaacacgttcctcagccgcctgcatggcgacgcgtaccgttaccatcacctgttccaggatttcctgcgcgagaaggccgctgccgacggcatcgaccgcccgaagctgtgcaaggcggccgccgcgtactaccgcgagcaccgcgactactcccgcgcgctgcggttctggatggaaagcggcgactaccgcggcatcgatgcctatctgctgttgttcctgttcgagaacaaccgcggcaacatcgccgagtacgccgacttcctgaacacgttcttcgtggacgaggttcccgagcgcgcgttcaaggaatgcccgccgctgcacgtcttgggagcgtggcacgcctacctgaccagccgacgcgagctgttcgagcgccacatggacgcggtgtaccgcaacctgccgcgcatcgcgcgtgccgactcgcggttcatggagtacgcgcttctggcctacagcgtggaccatcgcacgagcatcctcgagaaggtgaagcacttccgcgcgttcggccggttcatcaagcggttcacgcccgaggggctggccacgaacatcgcgtcgttcacgcacaacctcccctacatgcaccgcagcaacctggactactccgatctggcgctggaggagggcagcatgcggaagctggaaggcaacttctcgctgctgctgggccaggagtggcgctacatcgagccgggcatcccggcgtgcttcgcctacgagcgcaaccgcctggacgaggcgctggagggcatcgagcgcgcgcgggcggctatgatccccgaaaacaaggtggaggggcggttgtgcgtggccgtcatgtaccagcagacgctttggcagctgggccgcacggacgaggccgatgccgtgctggacgagctggacggcctggtggagcgcgaggcgccgttcttcctgccgaacctcaaggcgcatcgggcgaagctttcgctgctcgacgccgacaagcgcgtcgcgcggacctggctcgacgagttcttcgtcaccgaggtcgagcgggtggagctgtaccgcgtgccccagcatttcacgacggcgcgggctcatctggcgctggaacatcgggcggaggccctgcgcgtgctcgacttgctggatcggttcggccgggaattcaaccgcccgctcgacgtgggcgaggcgggcgcgctcaaggcggcgcttctgtgggcgtacgggaagaaggccgaagcctgcgaggcgctgtcgtcggcgctcgaggcgcttgcgccgtacgggttcgtgcgcatcgtggccgacgagggcgcgtcggtcgaaccggtgctcaagcggctgctcaagcaggcgtcggcgccggaatacgacggtccgctgaagcgttcctacgtgcacgagctgctgttggccgcccatgccaccgctcagcgccactccggcgtgaccgcgaacatcgtgccgaagaagaagcccgtgaagctgtcgcaacagcaggcgctggtgttggagctgctggcgcagggccgctgcaacgccgacatcgtcgcggaaatgggcctgtcgctgtccacggtgaaaagccacacggccgccgcctaccgcaagctgggcgtgcacaccgccatggacgccgtcctgaaggcccgcgagctgggcctgctggagtaggcttccttcgttgggggagtcgatcgggacgaggcgcgctcccctgtcgcagtgcaaaagaaagcgctcctgcataagcaggagcgctttcttcggtttgtgctgcgcagtttcgcttactcgcttctcagcgcttccaccgggtctttcctgctggcggcgctggaggggatgaggccggccaggaacgtgaggaacacgctgatggccaccaggatgacggcggcctgccacggcagcgaggccacgttcgccacgtcgaacagcgagtagacgatggcgttggcgggtatgcaggccagcatggtcaggccgatgccgatgacgccggccgtgaagcccacgatgatggtctcggcgttgaacacgcggctgatgtcgcccttgctggcgccgatggagcgcaggatgccgatctccttcttgcgttccagcaccgaaatgtaggtgatgacgccgatcatgatggacgacaccaccagcgagatggccacgaacgccaccagcacgtagctgatcatgttcacgatgtcggtgaccgaggccatgagcgtgcccacgaagtcggtgtaggtgatcaccttgtcgtcttcgccgtcggcggtcatgcggtcgttgtaggcgtcgaggatgccgatgaccttctctttgctctcgaagtcgatggggtagatgtcgatgccgctcggcttgttgaagtcggcgtagcccagcttcttcaggttgttgtcgtaggaggcgtcctccttgcccatcatcgacatcatgagctcggtgaggtcgttctcgtccatgttcatctggaacgcgttggcgaaggccgactcatcgatgctcatggcgttagacatgttcgcggcgatctggttcatggactgctgcatggcagcggacacctgcgtttccagcgcggtctgcatctgctgcatgtacgcgcccagcacgttttgcatgtacgagctcatggccgtggtgatggacgcctgcagctggctctcaagcgcctgcgccatggcggagacggcttgctgcatctttgccgacagctgctgctgtagctgggtttgcagggcttcggtggcctgcttcatgtcgatggatcccatgatggcatcggcgatcttcttctggacctcctcgctttcgaggtaggctttcgctccgtcttccatggtgggaaccttaccttgcgcgacctgttcctgcgcccagttcgcgtaccacgggttgaaccctgccatgatgtcttccatggccgcctgcatcttcgccgaatccatggtcggctgcacatcgcccagatccagcttgatgtcgctgaaatcgaccaggttgctcatgtcgatgctgctgggatcaagcgcgatggacgagccgtcgaacgccggcagcgatcccatgtccagcgacagccccgacaggtccagcgacatgcctgacaatccgctggtcagcgcgctctcgtcgaacttgaacgccgcctggatggcatcgccgtcgatagtgaacagcgactgcatatcgaagccctcgccgtcgtcttcctcgccgaacggcttgtcggtgaacacgttggtgtcgggatgagccagctggtccttcacgatggtgctgctggcggcctgctcgatcacgtagtcggtcagcgtggaggggtagttgatgcccgagctcagcatggtggcggtggcgtcttcgcgcggctgcacgatgccgacgatcttcacgtcctcgccgttgttcaccaggttgcgcatgtagtcggtgtcgtccgtcttgtctttccacacgttgaactcgtcgtcgtgcacgtagtagtccgtggcctgcaccagcttgaacgtgatgcccaggatgtcgtcgtaggtgggctgctcgatgttgtcgggcgtggtcacctcttcttcggccgcgaacttcttaaccatgtcgtcgaactcgttggcgtcgcgcagacccagcgtgtacagcatgaaatcgctgatgttgccgttgcctgtgagcacgagcaccacctcgttgtggttctcgggccagtgtcctgctttcacgtcgtactggctctcgtacaggttcgggtcgctgggcatctcgtagaacacgtcggtgctcatcgacatggacatgaggctgttcgaggatgccgttgagcccaggcccagcgcggacagcgacttgtcggggttcacctggcgaagcttatcggtgttggagctgtatatctgcggagccacgttgtaggtgtattcgatggcgttcgtgtactggtcgatgtcgctctgaccgctgtccaggtactccttcagcgacgccagatcgttcgagccgatgctggagaacatgttggtgaccatctcggtgacgcctactttgtcctggttgccgtcgccttcggtttcccccgtgttgccgcctgccccggtggccgcgcccagcatcatggaggtcatgtcgaagccggtgctctggatttgcagcgggtactccgatagcgtctcctcttcgacggacttgatatagttgttcacgccgttggccaacgacaggatggaggcgatgccgatgatgccgatagagcccgcgaacgccgtcatcagcgtgcggcccttcttcgtcatgaggttcttgaacgacagcgaaagcgccgtgaggaacgacatcttcgtacggcgcgcgggcttctcgctcacgcgcatgtcctcggcggtgggctcgtaggggtcggtgtcggagcggatgacgccgtcggtaagcgtgacgatgcgcgttgcgtagtcttcggccagctcggggttgtgcgtgaccatgatgaccaggcggtcgttcgcgatctcggtgagcaggtccatgatctggacgctggttttggagtcgagggcgccggtgggctcgtcggccagcaggatctcgggatcgttgatcagggcgcgcgcgatggcgacgcgctgcatctggccgccggacagctggctgggcttcttgttcacgtgatcgcccaagcccacctgctgcaacgcggccaccgcgcggtcgtggcgttcggcgcgcgacacgcccgacagcgtcagcgccagctccacgttggacagcaccgtctggtgggggatgaggttgtagctttggaacacgaagccgatgcggttgttgcggtaggcgtcccagtccttgtctttatactgttcggtggagatgccatcgatgatgaggttccccgagtcgtagtggtcgaggccgcccacgatgttgagcagcgtggtcttgcccgagccggagggccccaggatggccacgaactcgttgtcgcggaacgacaccgacacgttgtcgagcgcggtctgggtgaagtcggccgtcgtgtacgacttgcagatgttgagcagttgcagcatggggtgcctttcggtgcgttcctcgcgaggaggcgaaacgcaggtgttacgcaatggttgatgcttcgttaatcatggttgattttcctgctttcccttcttgggaaagagcaatcttcaccgagtttaccgaacggttacttttgggttcgcgcccgcttgcttacgatttgcgggagattgcgctttcggggtttcgctggcgctgggcttggcgataatggggcggaataagaaaacggcggcgaaaggacgcatgacatggaacgcgacgtggcatggaagaaatacgacgaagccgacctcgaggcgctggagcatctggctgccgagtacatcgacttcatctcggacaacaagaccgagcgcgagtgcgcggcttcggccgtcgcgctggcggaagagcacggctacctgccgcttgaccaggcggtgcgcgaagggcgcacgctcaaggccggcgacaaggtgtgggcgcaggcgcacggcaaggcgctcatcctggcgcatctcgggcagaagccgttggagcaggggctcaacatcctgggcgcgcacatcgacagcccgcgcctcgacctcaagcagaacccgctgtacgagtcgaacgggttcacgctgttcgatacgcattattacggcggcatcaagaactaccagtgggtcacgctgccgctggcgctgcacggcgtgatcgcgaagaaagacggcaccgtggtggacgtccaggtgggcgacgacccggacgatccggtgttctgcgtcaccgacctgctggtccacctggccggcaagcagatggcgaagaaggccaacgaggtggtggagggcgaggacctggacatcctcatgggcaaccgccctttgacctgcggaggcgggagcctcgacggcacccagtcgctcggcagtcctggctcgcacggacggtccgctggactgtccggctcgtgcggaactcgcttggtgggcgccgccgaggctcccggggaatctgcagtggacggcgatccgaccgaggatgtccaggctcctgctggtaaagaagaagagaaggagcccgtcaaggcgttcgcgctcaagctgttggctgagaagtacggcatcgaggaagaggacttcttgtcggccgagatcgaggtcgtgcccgctggacgcgcccgcgacctgggattcgaccgcagcatggtgatcggctacgggcaggacgatcgcgtgtgcgcctacacgtcgctcgtggcgcagctcgcgctcgccgggacgccggagaagacggccgtgtgcgtgctggtggacaaggaagagatcggcagcgtgggcgcaaccggcatggcgtcgcagttcttcgagaacaccatggccgagatcatggagcttgccggcgagggcggcccgctgccgctgcgccgcgcgctggcggcgtccagcatgctgtcgtccgacgtgtcggctggcttcgaccccgcctacgccagcgcgttcgaggcgaagaactccgcgtttttggggcgcggcctggtgttcaacaagtacacgggcagccgcggcaagagcggctccaacgatgcgaacgccgagtacgtggcgcgcatccgccgcgtcatggatgacgccggcgtgtcgttccagaccgctgagctgggcaaggtcgacgtgggaggcggcgggaccatcgcctatattcctgccaagtacggtatggacgtcatcgactcgggcgtggcggtgctgtcgatgcactccccctgggaggtcaccagcaaagccgacatctacgaggccttcaaaggctacgaagcgttcctgaagaacgcgtaggggcagcctgcgggcaatgaagcatcagaatcgcgaacgggggcggggacgcatcgagcgtccccgcccccgttccgtccgcgcacccgccgcccgtctcgctatgcttgctcttacgagcgtctccgctcgatgcggttggcgtacctgtctcctgctgcctggatgatctgaaccagcaccaccagtaccgcgatgcacgcgatcatgattcccgcgttgtaacgctggtagccgtagcgatacgcgaggtcgcccaggcctccgcctcccacaagacctgccatggccgagaatcccagcagcgagatggcggtgatcgtaatgtctttcaccagcggcacgtgcgcttccggcagcacgatgcagaacatcgttttcagcttgccggctccgctggcaaacgcggcctcgatcatgcccttgtcgacttcggccaacgacgcctcgctcagccgcgcgaagaaggccaccgccgcgacggccaaggggatcaccaccgcctcggtgccgattttggtgcccactaccaatgccgatagcggcagcaagaagatgagcagaatcaagaacgggatggagcgcaccacgttcaccgtcgcgcccagcaccttgttgagcaaggggctgtttatgaacaggtgcgtgctggaagcgtagagcaaaatgccgagcgcgccgccaaccacgatggcgatgaccagcgcgatgctgcacatgaacgcggtctctcccagcgttttgcccacttcgagtagaatctcgctgatgttatccggcatgcttcaacacctccagatgctcgacctgccctctcagatgcgcggtcgctcggtctatttggtcgttggcgccctcggctcgcacgtacaaaatgccgaagggcttctcgttgatgtactcgatcttgccgtgcaggatggaaaggcgcacgtcgaacaacttccctgcatcgaatagcacgggttcggtggcgttttctcccgcgtaggtgagcttgatgatagagccgttttgctcgaacgcgccgcttggcagggcgaagttctgggagtgccgcaccaggcctcgcagcatctcggactgcgggttggagaacacctcgtaggtttcgccttgctccaccacgcgtccgccgtccatcactgcgatgcggtcgcagatgcctttcaccacgtcaagctcgtgggtgatgaccacgatggtcacgccaagttgctggttcacgcgtttcagcacgtcgagcaccgattttgtggtttcgagatcgagcgcgctggtgggctcgtcgcacaggaggatgcgcgtgttggcggccagtgcgcgtgcgatggccacgcgctgcttctgtccgccgctcagcgtttgggggtacgcgtcgcgcttctcctccaggttcacgaactccagcagctcgacgacgcgctcctcgatgtcctgcttgctccaacgggcgcacttcaaaggaaaggcaacgttgtcgtagacggtcttggcattccataggttgaagtgctggaagatcatgccgatgccgcagcgcgtttcgcgcaaacgggcgccggtctgccctacgatggatgcgccgtcgatcacgatatctcccgacgtgggcttttgcaggaggttgatggtgcgcacaagcgtcgacttgccggcaccgctcgacccgatgatgccgaacacctcgccttccaggatggtcaggctcacgtcgtcgacggccgcggtggcggaagccccgtctcgggaaaactcgacctggatgttcttcagctctatcatggaacgaccttcctttgcgacgattgcctagtacgagctgggcttgccgaagccggcgaagatgttgtcggggtcgtcgatgacgcttttgaacgcatcggattgcacgattcctttcacagcctgggcgaattcggcgtcggcatcggcgccctgcacggcgatgacgttgtagtatccctcggacagctgctcgacgtaagccgcgtcggcaaggtcgaggccggcgccgatggcgtagttgccgttgatcaccgcgacgtccacgctgtccagcacggtgggcagcacttcagcgttgacctgctggaaggaaaggccacgcgggttctccgcgatgttgttcacccctgctttcgcggggtcgacggaggcatccagcgtgatgaggcccgcctgctgcagcacgcgcagcgctcgcgacaggttggtgtcgtcattgggaatggcgacggttgcgttcgggggcagttgatcgagcgagccggctttgcccaggaacacgcccatggcggcggtgggcacctcgacgatggatgcgaggtcgaggttgtgctgtttggagaagctctccaaataggtcgcatgctggaacaggttgaggtcgatctcgccgtcggccagagcattgttcggctgcacgtagtcggagaattcgacgtacttaaccgagtagccctgctcggtcagagagggttcgatggcctgctcgaacatgtcttgatagggtcctgcgcacacgccgactcggatagtttcggcattggagccgccggtcgacgtacagccgggcaggatgagcagggcgacggccaagcaggcgacaagggctgcggcggcgcggcgggctcgcgacgagcgcgatccggcgggggtttcatgtgaagcggtgcggatagtcatgggtttggtcctttgtctcgatgaggggtgctaagggtaaaaaaagaagccataggcttcccgtcttcgcatgcaatgctctcggcgcgcttatggcagcgggagaactgaatgcagatgaaggcaggcaccagggcgcgtgggttggggcgattgcattcgcatgagcacgggctctcctctcttcagtggggtgaaagcattatcaacggatgcctagattgaaacaaggggtttggtcattcgtagttttggacagcagtcatctgataaacagataactcggttaacggtaaagtcgtctacgcaggtaaagggcgggcaggtgcacggttagggcaggccgtgcaccgtgcgctgccgaactgccaattggcttcattgccgtcttccgctacactgctcgcattgttttttgcgcgtccggactgttcagtctgggcgctttcgataagcgaggacgtatggtacgtgagaaattcggatcccgtttagggttcatcctgatcagcgcgggatgcgccatcgggctggggaacgtgtggcgcttcccttacatcgtggggcagtacgggggcgcggcattcgtgcttttgtatttgctgttcttggtggtgttcgcgctgcccattctcgtgatggagttcgcggtgggccgggcgagccagaagggcgtcgcgcgcagcttcgacgagctggagccggccgggtcgaaatggcatcggttcaagtgggcggcccttgcgggcaattacctgctgatgatgttctacaccacggttgccggatggatgctggcgttcatggcgttcagcggcgcgggcacgttcgagggcctggacgccggcgccgtcgaaggggtgttcaacgggcttctggccgacccgcttatgatggtcgcgttcatgctggtcgtagtgctgataggcgtgttagtgacgcgggccggcttgcgcaacggcgtggagcgcattacgaagacgatgatggccgccctgttcgccgtccttgccgtgctggtggtgcgcgcggtcacgcttccgggcgccgaagagggcctgtcgttctatctcatgcccgatttcgcgaagctgttcgaaggcgggtgggggacgttcgtcgatgccgtgttcgcggctatgggccaggcgttcttcacggtgtcggtgggcgtggggtccatgtccatcttcggcagctacatcgataaacgctaccgccttacgggcgaggcgctgcgcgtcgcggggctggacacgctcgtggccatcatggcgggcctcatcatcttcccggcgtgcttcgcgttcggggtggagccgggcagcggccccggcctggtgttcatcacgcttcccagcgtgttcagccagatgccggtggggcagctgtggggcacgctgttcttcctgttcatgagcttcgccgcgctgtccacggtggtggcggtgttcgagaacatcatgagcttcagcatggacgagtggggctggtcgcgcaaccgcgcttgcctggtgaacggcatcgcgctggcgctgttgtcgctgccgtgcgtactgggcttcaacgtgtgggcgggcgtggaggtgccgggtatcggcaatatccaggccatcgaggacttcctcatgtcgaacaacgtgctgccgctgggcgctctggtgttcctgctgttctgcacgtccaagcggggctggggttgggatgcgtttctgcgcgaggccgacacgggcgagggcacgcgctttcctcgctgggctcgcggctacgtgcgcttcgcgctgcccgtgctcatcctggcggtgttcgtggccggctacgtacccatcgtgcaaacctggctggggctggggtaggcccgcggcgccggagggagggcgccgcgggccgagcggagcggggagaagtctaaaggtttcggtgcaacttagatctcgcccttcacggtttctgccatgaggtagccgtagttcatggcggcgtcgaagcccatcgcgtagggtcggccgtccttctcctcgatggatccgcatacgtcgcccgccgcgtacagtccggcgacggcttcgcccgagtcgctcagcacgtgtccttcggtgtcgatggccaaaccgcccgtggtcaggtagaacgtggggatgcaggacactacccaaacgccatcatgcgtgtcgaggtagggcagcttcttgcgtccgaactcgtcttcctcgccggcgagcgcgtgggcgttatgcgtatcgagagtggcagcgaggtcggtcagccccagctcctcggcagcagcctccacggaatcgtagtgcaccatgtcgccgcggtgctcgaggcatttgtaggtatccatggcgtacagctcgttcttgttcgtggtgatgcggcccgcttcgtcggtgacgtagaagaacttccccccgttcgtttcatcgagaagcgcccgcccaagcacgccgtggttatccgacatgatattgccgaactgcttgcccgacgcgttcacgaggatgcctggcgtggtctggtacaagaaggcgatctcgaagttcgatccggcctggttcgtggtggacaggaatgcgcctaggtcgcgacccatgcactcgatagcgcctcccgccttctgtcccagctcgatgccatcgccggtggagccgggtgcgcaattgaacttgaagtcggcgtactgagggtagtgctccttgatcatgtccgggttggccgcgaaccctcccgacgtgaggcatacggccttcgctgtgacggtccaggtagagccgtcacgcccttcagctttgagcccggtcacgcgaccgtcggcatcctgcacgagttcggtcaccttcgtcgcgtatacgatctgtccgccaagcgcaccgatgcgatcgaccaggtagtccttcgcgtatccgcagccgcccatgtagcagccgggagccaaatacggcgtcacgccgtacgccttgttcacgcccaagctgtagaagcccacgccgatgccgtgcatccaatccaccagttgtccggagttcgagtacatggccgtttggtacggcatcgcgccgtcgaagcggtcgttttcgggaacgaggtacttctgcatgactgccaacatagcttgcttgttgtacatgggattgtcgtcggccctgccgagcgcgtagttcgcttgcagctgcgattcggcggcggcgacgcccgagtacgtcatgggcatggagccgccggcaatgtcctgcttctcgaagagcaccaccgttttcccggcttccagcagtcgcgtcgctgcaacgaggcctgcggtgccggcgcccatgaacgccacgtccacgtcggcggtctgcgcggcgccgccgctgggggttgcggcgcctaggcggaagtccttcggattaccgccggcgttcgtgatggcgtcggctacagcgctttgcacggccatcgatgtggtggtggcaccggtgactgtgtccacgtcgatgttcttggcttcgagaatcctcgttgccatcatcggagcggccgtggatccgatgccgatggtgtcgtcgcagcgcagcacgctgatgcctgcgatgtcgccgcccgcgacggtcacctgcacgaacaggtcgtcgtcgtggcccatagccgagcctatccatttgccgtcggtgaagctgtcgggcacgcttttcttctccggtttggcgtctttcgccgagtcgttgctcgcctgttgcggcgtcgcgcatcccgctagaccgcccagtgcggcgacgccgccgaatgcgagcgaccccttgagaaagtccctgcgattgagttccatagtgttgctccctcctcgattggtcggcgtggcttcgtgatcgccgtgcctcgccgaaatgaacaacgcgagtatcgccaggcgaggttgtcggagtcgaccccgattatcggtgcatgtatcgaaacggacggtttccgcctcgcccattttcggttattttttgcatcgtgcctggtcaatgtcattcgtatatgaaggctgcagatggttttccattcgacgcccccgtcgccgcgcgcaagacaaggtacaatgcgttcgggaggaaatcgcgtgacaagcaagcatgcaggcatagcccttggggcgctcggtttcggtctgtgcaagaccgcgatttcggttgcctacattacggcgatgggctcggtgtcctctactgtcggattcgtgtccgagcttgatttcatgttcgcgatgaacgcgatttcgtttgcgacggcgcttgcgatcatcgcgctcgtgcgcgcaggacggcttcgtccgggtgcgctatcgcaagttccggctgtgatcgcgttgctcgtcgggttctttttgagcgctaccggcgtaatggcggggctgccgttcgcggcgacggccgtgttctacggcgtgctgtgcgggttcgcgctcacggtgctcaatgctgcatggctcgaggcgttcgttgcggagcccgatgccgcttacggcgtctaccaaatcgtgggtgggctgatcgttcaatgcgtgctggtgtcggtgctaccgcttttggggtcgcttgcggcaagcgtgctctccattgtggcggtggtcgtttcggcctgcctgctcgtgcgactcaagcgcatgctctcgtttgccgagcgcgacgagcttcttccggcgaaccgcggcgatcgcctctcgttgctgcaggcgttcttatgcctgttcgtgctcgtgggcgttgtgggcatcctgcacaccacggtactgggctcgcagtccgagagcatcgtaggcgatgtgaacatgtggatgccgctggtggcggccacggcgatcaccgcgttggtggcagggctcaccatgcgacatcccgatcccacggccgtctacaagggttgtctgcccgcgatgctggcgatcctctcgttgctgccgtttttcggcgaagcgctcggcgggctggccggtctcgtcatgatcacgtgctacgacgtgtgcggcatggtgttcctgctgttcatagtcgatcgtgcacgcacgttgcgcatgtcgagctatgtgctgtcaagcgtgtacctgggcggctcgggtctgttcttggtgatcggcctgtccataggcggcgttctgggcgcgctcagcgccgattacgggctgtcgttgttgacgctgctcgcgttcgcggccatctacccgttggccatcgtgctggtggtcgcgttgcgccgcgcgcatccgcaggacgcgtcttccgccgcggcgggggagggtggggaaggcgcgccgagcgcggatgccgttcccaccgtcgacgacgcgctgggcgcgggcgtcgacgcggtggcggcgcggttcgaactgacgccgcgcgagcgcgagatactgggctacttggcacgcggccgtacagccaagttcatcgccgaagagctggtcatttccgagaacaccgcgtgggcccacatcaagcgcgtctacgcgaaaaccggtgtccactccaaacaagagctcatgagcgtcgtcgagcagcaaggaagaagccgctagaaacgaaaagcgccccggctgagggagggagccggggcgcacggggagggtgacggtggtgcgggcctacttggcttgggcgtcccacgcttcgaggcttgcggcgtttcgtcctgcgatgcggccccacaccatgttctcggcgttgtttccgcccgagatgccgtacgtgtggccggccatgttgccgaagcatccggcggcgtacaggcgcgggatgggctggtcgttgcaatcgacgacgttcgcttcggtgttctttttcgggccgcctagcgtggagcagccgccggggtacaggggccaggcgtagaacgggccgtcgagcgagacgggcgcgagcgtgtcggcggttcgatcgaatgcagggtcgtttccttcgtcgcagtatgcgttgtacgtttcgagcgtggcttgaaccgatgcggcgtccggggcgttgtcgacggcggccatcttcgtgcaaagctcttcgagggtgtcggctttgatgatccagcccttttcgatttcggtttggttgtcgacgctccaaccttcgaatcctccgcactcgctgggaatgtcttcgagtgccatgccgatggcggtggaaccgccgggggtgttcagcacaccgcccttcacggcaccgagcggcccggcatcgatgacttcttggccggcgatcacccaggtgggaatgcgctcgaagtcggcgagcgtcgagtcgttgaacttttcgaattcgtgccatcccacatgcgggctcaagaacgtggactcggcgatccaccgcttgcccaggcggtcgagcatcacgtagttgttcgcgcccggcgtgaccgtgaacgcgtacggccactcgaagtctttgaagtaggcgttgtacgagccgatgatgttgttcatatgccacagctgcgcgcccacgttctgcaccatcttgatgccgtcgcccgtgttgaacggccagccgtagaagccgctcatggggtagcatttgcagtattcgttcttgagctcgtcgttgaactcgaatccgcccagcgtcatcaccacgcctttgcgcgctttgacggctttcggtgcttcgtcgtcgccgatgagcgtgtagcagccgactatctccttcgtgtcggggttttggatgagctcctcgtcgtggcagttgaaaacgacttcgatgccgaggtcggaacgtgcttggtcaagcgtatgccagcctgcgttgccgcccttggtgggatcaccgaacgagcaaacgtgcatcgcctcggcgccttcgatccagggatattcgcagctggaggtgccgcccgaggcgttcgtgcccttcttgagctccgtgtcgatgttccagtaatcgcagtaatccatgttctggtagcactcttccgcccacgctcgcgcgatgtcttcaggcgtgtggcccttcgagaagccggtgatgtactgcacggctccgtcgatgtcgtcgacccaggtgtactcgcccatgttgatggacgagttcccgcctccgcgcgagggagctttctcaagcacgagcacgtcggcctcgccctcgtccttcgcggtgacggcggcccacaggcccgcgccgccgtagccgatgaccagcacgtccgtctcgtaatcccaggttgacggcatccaatcgtccgatgcggaggctttctgcgcacagcctcccagcgctcctgcggcagcaacgctcgcggcggcgattcccgcccccttgaataggtcgcgtcgtgtcaagctcatctcgatcccctttcctgtgcggttcgctgcacgtgcagcgggttcctaactatgctcatggcaggtgtagcattcgaacacgtcggcatggtggcagctcatgcagtacgctttggcgtccccttgcagatcggtctgctcctcgtgcatgctgtggcagtcggtgcaggcgatctggccgtgcgtgtcggtttccggcagctcgtgcgggttgacggtggtgccctgcgcatcggagagcgcggtgcacgagctgctttccgctgcgatttcatcttgatcgtggcagctcaggcacactgatgcttcaaccgtggtctgcttcaacctcgatggcatccggtcgtctgacgaggcgccctcatgctgcttggccaaggtcgcggtgtcggtatggcagtcggcgcattgcaggctcgtgtgcttcgaagccgtgcacgcggcatcttgccgcgaggacgcttcgtcggcgtggcaggtgctgcaatcggtttcggtcgtccactcggtcagcgtgatggacccgtttgcggcctccgccttcggcgccgctccctgagaggccgcttcctgcggtgagcagccctgcaggcaccccagccccgcggcgcaggcgagcacgctcgcgcagacggtcagcagtacgaccgattttgcgttggcgcgtacgatcgcttcccctttgttcagcttcatggttcctcctttccgtggcgtgaattccaacgggctccatggtggcaggagaagcgggcgcagaactcccctccgacatatgatttgcggcgaaaacccttcatctgtttcagagtatttcctgttggtgggccgtgcggaccctgcgaagcaagctatgatgaaggtgctttcaaacaggctgcatgttcttggagggcatatggcacaaggggacgagggcgcgcggggcgcccgggttgaacgcggagcggtgcgcacgggccgctgcgctgcaggactggcgctgctgtggttctgggtgccgtgggctgcggcgatcgcgcatccgttggaacaaggcgctctgctggccccgttgctggcgacggccctgttcttcggcgcgtgcgcatgcgcggcgcttgccgcgctgcggctggcgaagcgcgtcggtacggggtacgcgcgcatgggggacgtgcttgcggcaagcgcggggagcctgggaagcgtgatcgccctgctggcgtacgcggcgggcgaggcaagcctcgcgttgcaggtgctggcgatgctgctgtcggggttcgcgatggggctcgccatcgttcggtgggagcggagcgtggccggcgtgtcggagcgggggatggtggggtgcgccgccgctctgctggcatcgtggtcggcgctgttgtacgtcctgttcgcgggcggtggttcgggggcgagcctggcgggactcgcaggcgtggtctcgcttgccgtgcgccctcgtgcattgcggcccgatgcgcaggatgtggtggtcacccggctgctcacgttgcaaacggcctcgtttctgaagcgctacgcgggagcgttcgcggcgtcgggggcggtgaccacgttcgcgctcatccaattcgcctccgcgcggttcgcggtcgtgtccgacgatacgtttctggtgctgctgctggttgctcccgtgtttctgctcgtcctgctgtgcgcgtggctgcccaagcgcgagcagaacttcatgctggtgttccacctctcgttcgtggtggcgctgctggccttgttcccggtcaacccgggaacgccgatatcgctcaacgtgtctgtggcgttctgcctgttgtggatcgggtcgctcgtggggtcgctcctggtcatgggatcgcgggtgaatcgggcgcttcggccttggtgcgatccttgcggccttgggccggcggcgttctgcctgggcgttgccgcgggcgcgctcgtggccatcgggtggacgatgacgcccgacttcgagacggtggcttccggctctcccgacggcatcgtgaaggtgagcgtggtcacctcgttcgcgctcatcgtgctgttttgcgcgacgaacgtggtgctgcgcggatcgatgctgcggcgggtggagctcatcgcgcgcggtcgcatcacgcaagtgatgccggcgccgcggtcgttctccggatcggaggcgcacggggagggagacgcacccgatgcgctgcaggatgcgtaccggcgcatcgcgttcgaccgggggctcacgccgcgcgagttggacgtgctcgtggtgctggggcggggcaacacgctcgcgcgcgtgcagagcgagctggtcatctccgaaggcaccgccatcacgcatcggcggaacatataccgcaagctcgacgtgcacagcaagcaggagcttctcgacttcgtcgagcgctacgcgcgcgcatgagtcgggggagggacgttctcctcctacgggcgcagcttcatatggatagcttgggcggggcaggcttccacgcaggcaccgcatttcgagcattcggggatacgcttgctgtggggatccacttgctcggggcaggcttccacgcaggcgcggcaatccacgcccgagctgcgcaggcatgcgtcggcgcgcacgcgcggccgcagggtgcgattcaagcccgagatcagggacacgagtgcgctcacagggcagatcttcgcgcaccacttgcgcaagaacgctatctccagcacgaggatggcagggaagatgattagcccccacgacgtctcgttgaactggaacaagtgccacactcctatgaaggtggcaaacgtgagcccaatggggcacacgaggcagaacacggggaatccgaaaacggccgaagctcccagcgcgccgagcagcgtggcatggcgcgtgtccaggcgcaggccgtcgcgccctcctcccacgggcgcgagcgcgcaagaggcgcagcggtggccgtcttcgcgagcgtgggagcaggcgtgatgtgcggcggagacactgccgtctgcggccttgcgcttacccggcttgaagagtcgctttagccagggggcggggcacatccaggcgcagaacgccttgcccaccagggctatcaccagcaccatacccaaaagcagcagcaggggttgaagcatgatctggcgtgctccgaacatggtttcaagtgcaccgagcgggcagatggcggctatggattcgataccgaacgcggaaggcgtgccgatgccgatgcggaaagtcaggccagcggcgactgcgcatacggcaagcgcgaaagcagccccacgcgccttgcggaaggggaagcgtcgcgtccggccttctgcctgtcggtcgtggtccgcggaggcttcacgcgaagcttccgtgcaatcggcgactccggttttctccgacagcacctcattgggctcgtccatcaggcgctcctctcaacgttgatgccgcgttgcgtgccgccggcaaacgaccggtacgtgttcgaggggcagcggtactcgcagatgccgcaaccgttgcagcgggtcgaatccacaatgggccgccccgacgcgtcggccgagagcgcctcgtaggggcacgcatccacgcacacgcggcaacttcccgaaatccaagcgatgcagcgctgcgggtcgatgaccgcaaggccgatgcggttcgctttcgcgtccacgtctcgaatggcgccggtggggcacgtttgctcgcagcgcccgcaaaagtcgcacagcccacggtgaaagtccatcacgggcgtccgccagttgagcagcccgtcctcgagcgtgcccgtgcgaacgcatccctgcggacacgccgaccggcagcgatcgcacttcaggcacaggctgcggaagcgctcctcgtcttcggcgctgggaggccgcaggcaggttgcgccgccgtcgagtgcggaagcggcgcttcccacggcgaagctggcggcgacgagcgcgctgccagctacgagcgatctgcgagaaagcgacagggtcatggcgaagctccttggggtgggtacgatagcggtcgtccagcggcaaagcggccaagcggtcaaccgagccgatgccgaagcgctgtcggggagggggatcgggacagcgcttcggcatcggccgtctccccggctcgcgaccgaggagacgggccggtttagatcagaccgaagaagtcgtacagtccggcgccgataacccacatagcgcaacggaaagcaatcgaaccgataagggcggcaatcagcgcgacggctccaagcgccacggcgctgcccggcttcttccgggcaaggaagccgcacgcgataggcgcgacgcctccaaacgctgcggcggcgatcgtcatcggggcggcgtctccggcgaatgcgcctgcgaccgcgccgtacgccaagaccgtgatcagcgccacgcagccggccgccagcgtcatcaggccgtagaggctgcaagcattctcgtcggccttctgcgcggcgatgagcacgaggtaggcggccgcgcccgatgccgccgccgtgcccaggtagccgagcggcagcagctcggtgttccaggcggcaatggcgctcatcaggtagctttgccccgccatgaacgacatcagcgcgccgagcgccatgccgacgacagccactgctttgagggctccgccgtcgatgccgcgccggagcatgaccagaaacgcgatcatgactatggccagcagacccaccagcaaggcttcggtgaagatgcccgaagtaggatgctgcagcgcgcccagcatgcggtcgggatgggacaggtgcgtgaccgaagccaggcctcctacgacggtcagcgccaaggccgtcgccgtgccggcgaacgcgcccttgtcagtcttgcggacgaacacgttcaggcagatgaagaagaacagccatccgcccatgcccgtgagggcggtgaagagcacgagagaccactggatgtccattacttcacctcctctttccattcagcgtacttggctgacaggatgtaggccgtctgagggccgttgcccacgtccttcaggcgatgaaccgagtcggcgcctgcggcggcaagcgctttggaggcgtccgaattcggatcgtccagatcgccgtagaagcgagccgacgcacagcacgccgccacgcacttgggctcttcgcccacgctggtcagttggccgcagagcgtgcacttctccaccacgtgttccgacgggctccatgaacgcacgccgtacgggcaggccatcatgcagtacttgcagccgatgcacttctccttgtcgaccagcacgacgttgttctcatcgcgataactggcgccggtggggcacacgtgcgtgcacggcgagtcgtcgcactgctggcacataaccggcaagaagtactggtgcagatgcgggtagtctccgaacgggcccacctgcaccactttgttccagaacgagccaagctccacttcgttctcgtttttgcaggcgatctcgcagccgtggcagccgatgcaacggtcgagatcgacgacgatagcgtaatgcgacattatgcggcacctcctccggtgttctcagacggttgcggcaaccaaggcgcgaagtcggtcggctcgtgccacacgccttcggggcgcgacgccttctcgaccttcacgttgatgccgcgcagggtatacgtgccgaactcggggttgtagtagcccgtgttcttggtgagcacgttcatgttgcacagcgtccagctcttgcgcgggtcctggccctcttccaagaactcggggttccagaagcgttccatgtaggcgctgccttttgcgatgccctcggtgacgtgggctacgccgtagatgccgtccttgaccaggctctgaccctcggcggtcagctcttggccggtcttgaggttcgagaacacgtccaaaccgtcggtgcggggcgacttcacgttcacccagtcgccggtggcaatgccgtgctcctcggcgtactcggggctgatccacacctccggcgcggggtagatctcgcggatgtaggggttgttgcgcagcgtgccgtggtggaagtaggggatgcggccctcggtgagcacgagcgggtagtcgttgccgtattccagacgatcgtccggatcgtggaagtagggcatgggcaggtactctgcggaggctgccggcatctcgaagctttcggcgccgtggcggccgaggtagatcatcgtgtcgccgtaggggccgcacttgagcgggttgtccttgatgtcgcgggcggcgcagcccgcgaagccgatgtaggaggagccgtcgcttgagaggccacggtaagcctgctcgtagggggcgttccagtattcctcgggctcgacggcgttatacggcgccttcgcaaccagctcgtcccaggtcatgttcacgttagaggcaacccactcgtagtagtcctccatggaatcccagtacgccggggcggggccgcaggcgtcctggtcgaaggacttctgcatgccctcgtggccgcgctcggcaagcgctttggccagcatcgaccaaatgaacgtctcgtcgatgcactcgaacaggttcgttaccggctggcgcaggagcaccgcgtacaaacgaccctggatgaacgcggtttccagccattcggcggtcggcagcaagagatcggcagcctcggtggaaaacgacgtgggatacatgtacatgtgcacgatgaggtcaagcttggggaacgcgtcaacccacgacgcggcgttgccgagcatggccatcttgttgcccgagcgttcgatccagatgtgcggctgatacggctcgccggtgaggatggcgttcaagatggtgggaatgtggctgtgcatccagctgcccagacccttgtgctccacgtagcccaggcgattctggatgttctccggcgtctggaactggtaaggcgaatcgccaaagaagcccgtggggaacacggtggactccgccgagcgcgggaggctgttggcggggctgccgggcttgtcgatgtagcccatcatgcagtcgagcgccgccgcgccgatggcagcctgcgttgactgcgggtattggtcggttgccacgcccaggctgatgccgcccgactcgcactcggcgtagagcttgatggcctcttccaagtcgcttgcatcaaccatgcacacttcggccacgtggtcgatcgtgaactcgtcggattgctccttgtaggcctcgaaggcagtcttcgccttgatggcggtgccgtcggccaaggtgacatcgtaggcgccgaacagcgccgggttataggaagcctcgttgtccgggcccagagcgaacgccttggttacctcgccggttttttcatcgtagtagacatagccctcgttctcggcggtgacgtcggcaaacaccttgctggcacgcaagagcgcgcctgccgggtcgctcgggtccaccaggaagggcagattggtccacttggagcagaactcctcgttgtagagcttcttgtcgataatgtagcgcgtccagcccagcatcatggcaacgtcggtgccggggcgaaccggcaaccacacgtcggcgcgggcagcgtcgggggtgtagcgcgggtcgatgaccaccgtcttggtgcccgcggcgcgcagctcaactacggcacgaccggcagaagagggtgcatgctgagccgggccggtgccccacatcacgtaggtgtcgatggacacggtggggttgtacagctcggcgcagccggagtcggcgatggaggtgtcacttacgccgttgatcagcggcatggtgtagttgcgcggcaggtagcactgcgcgcaacccggctcgaacacgttgcccgcgccccagaagttgcggaaacgcggcgggctgaagaactgcgggttgccgccgccgcccgtggagcagaggagaccttcgaggccggttttgtccttcatgtccatgagcgcgtcggcgatggtgtcgatggcttcctcccagctgatgcgctcccactggttgccgccacgttcgcccacgcgcttcatggggtacttgttgcggttggggtgatacagcgcctgaatgcccgagaggcccttggggcacactcggccctcggacatggggtcggcagggtcgccttcgagcttgatgacgcggccgttctgcacgtgcgcgatgatgccgcagttcgagatgcaggcgcggcacgacgtgtgcacgagcttgacctcgtcagccgcgtacgcctggtcgctttcgaccagattgttcacggtggcaacgccagaccccagtgcagcagcgccggcggctaaggccgatgctttcatgaagctgcgtcgggtgaggttcgttggtgacatattccctccttctttctctctctaactcgtctttatgggctggcggaatagcgccaacctgtcagaccgatgcaagggcgcgcttccccgcatcggtagtgacccaagatccgtcccacaccaagccgcctgcttcttccaggcggtcgatgaagtaacaggcgtgcagcttttggcccgcggttcgctggctgggagccagggcggggtcgtctgcgagcagttgattgatgtcggccagcttgcgcggcgtgcggcagaagtccagcaggcgcacgaaggtcgcgcggcgctcgggcaccttgtagatggcggcgagggtgcgatgctcgggggccagcaactcgcatgcggcgcatcctgccggcgtggtgagaacgcgacgctcggcgacaagatcggccagcgcgtcgtcgtcgaggccttccgcacgcagctgttcgcagcgcgtctcatcgagggcgaggccttgcgcatcgtgggcgataacggtgactcccccggcagccgccaagttgcgaagcaacgtgtacggcgtttgcagcgcttgcgccgcttcgggctgccgcgccagaaattcttcggcggcatgctccgtgcgctcggtttggcagtggacaagcgccttatacaaaagctcgcgatggcgcgggtggttgaacaagcactccaccacccgcgcaatggactcctcagatggattcgccacggcgccccctctcgttcgataccgttcgatggagtcagcctacggttgggcaaggcgaagggcatcgtcatccgcgttctaacttgcagcagggttgccgggcgtctagtcaatcgttgactaggccgtgcgcaacgcgcggtcaagatagaacgaaacgcgcgatgccggagcggtccttcggtttttacactgggttcattcgtgcttgcgagagaaagacggggatccgatgggtgcatacagggaaacgcatgaggacatggctcgggaagcggagacgcgtgcgtcgttttaccgaacgttggcttcgctctatttcaaggaacttgaccaggcgggcattgatgcgctctcgaacgaggacttgactgcgacgggcgtggatgacgagttgatggaggaggggtacgccgacatggcggcctatttgaagcatcgcgacggcggtacgcggcaagagttggcaaccgatttcgcgggcgccattttggcggcggggtcgtatgacgaccgcagggcgacgccgtacgagagcgtattcacgtcagagagtggtcttttgatgcaggaggcgcgcgacgacgtgtatcgccgtttttgcgaggctcgcgtggcggtggacgagggactgcgcaccccggaagatcacctgagtttcgagttcgagttcatggctgctcaggccggcgagcaggcgcgggctttgcatgcgggcgatactgcggctgcggcatctgcccttcggacgcagcgcgagtttcatcgcgaccatctgctgaactggattgacgcgtactgcgactgtctgcaaagctgcgcgcaaacgcgtttctatcgcggagttgccaagctcacgcgtgggttcgtgcacatggacgaggacatgatggatgatgcggcggagacgttgtgctaggatagccgcaaatcgaggggcgagcgcggcggcgcacgacggagggggacaggtgtcggaaaccaggtgcgagcgggagctcgggaagaagccgtggacgcagatgctgttgcggcttgacgacgatatgccgctgctcaaatacttcggatttgcatgttgggtggcctggttcagcgtggcttactccagttccgtgtgggttgaaggcgcggaggagacggcttcggtcgtgtccgacatgttcttgtactccactctgagccatgcaacggcgttgctggcgtgcgcatgcttttcccaggcggtgtcgaaggtggccgatcgaccctggtttttggcgagcgccggcgcgctggcggcgttgggctgcgtgtgcgtggtgcaggcgggctcgctgctggtgtcgtcgaccgcgctgttcgttgcgggaagctgtctgacgggcatcggaacggcggcgctcagcatcaacgcgggattgctgttgtgcgcggttcggccccggcaggccttgcgtgtcattctgtattgcgagctgttggctgctttgctgcagttcatggtgctggggctgccggatccattcgatttggcgctgttcgtggcgctgccgctgctttctgcggcgtgcttcgtcgtaggttcggctcagcgcgcgaagccggttgtgcaggagagccagcgcttgaagccctcgaaggcgttcggtctgttcttgctggtggtatgcgttttgagcgctgcggcgaacttcggcaagggcatgcatcgggctgtcgtgtcgcccgggcagttggccgaggacggaagcatcaccacgttgctcacggtggtgtgcttggtggcgctgctgctgttcatctcgctgcggcgacgtgagctcaacttcgagcatctgctctatcccatggcgctggttattattttgtcgctgtccgtgacgtttttctttccgggcagcgccgtggtgggcgtggtgctggtgggcgtggcatttcagctgttcgacgtggttacctggtacatgttctcctacattgtgtatcagtccaaggcgagtgcggtgcaggtggtggcgctcggtcgcgccattatcgcgttgggcgtgacgatgggagacgcgttgggtgcgcggtgcgccggcatggggattgaggatgcgccgttggcaactgcagtgttcgtgctgttgttcgcggcggttatcgcggtgtttttcgtttttcccgaacgccaggtggataagctgttgttgcctattccggacgaggatgatgagggcgtggcgtctgctgatgcgtcggaggtctcggcggtggagggcgaggacgcgacagccgcagagcatcgcgggcgctggaagcagttgtgcatgcagctgggcgacgagcggcagctgaccgagcgagaaaaggaagtgctggtcatgttggcgcgcggctacgggtcgcagtcgatttccgatgcgctgaccatctcgttgtacactacccgggcccacacgcgcaatatttacgccaagctcgacgtgcactcgcgccaggagctggccgattgcgtgcgcgcctacgtggaggcgttcgacagggacgtagcgagcgggcgtgcgtgaggcgagggcctgcgagcgtcggcttttccgcgacgaacgtcgttcggcgcacgtgcgcgacaggcgctcatcggggtgctttcgaagggtgctatactcggcgatgtgcacgacatcaaggcggagaaggtcgtgcccggcgtcaccttgtgcgcgttcgaaacctcgtaccatccgtagaagttcaagtggggcgtcagctataccgtgtacgacttcaagcgggtggggcccgatcgggtgtgaggagggcgcggttcgtcgcgcgcgttcctgcacgggggtgcgggccgcgggggcgcacgcccccggtcttcgtcccccgcatcccgcgagcgtcccgctctttccccgcgcgcatatttttctccatattccttggggattgctcgcgtgggcggggctcccgtggctataatagcgggtaacacctgagtaacggatgcacggcggagcgatatgcgcttcgcggcaccccgacaccgcaccgaccgcagatggaggagtcatggcatactatttcgacgagccgtcccgaacctttaacgagtacctgctcgttcccggctattcttcggcccagtgcattcccgccgaagtcagcctgaagacgccgctcgtgaagttcaagcgcggcgaagagcccgccatctcgttgaacatccccatggtgtccgccatcatgcaggctgtgtccgacgacggcatggccatcgcgcttgctaccgaaggcggcctgtcgttcgtgtacggctcccagaccatcgaggaccaggccgctatggtcgctcgcgtcaaggactacaaggccggcttcgtcaccagcgacgcgaacctctctcccgagatgacgctggccgacgtggtagccctcaaggaggagcacggtcactccaccatgcccgtcaccgccgacggttcggcgcacggcaagctggtgggcgtggtcaccgatcgcgactaccgtttgtcccgtatgtccatggacgcgaaggtggccgacttcatgaccccgcgcgagaagatgatcgtggctccggccgacaccagcctcaaggttgccaacgacatcatctgggacaacaagctgaactccctgcccgtggtggacgacgacgattgcctcatgtacctggtgttccgcaaggactacgactctcataagtcgaatcccaacgagatgttggacgcgcacaagcgctacatggtgggcgcgggcatcaacacgcgcgactacgccgagcgcgtgccggcgctggtggaggccggtgccgacgtgctgtgcatcgacagctccgagggttattccgactggcagaagttcaccatcgagtggatccgcgagcactatggcgacgacgtgaaggtgggcgcgggcaacgtggtggacgccgagggcttccgcttcctggccgatgcgggcgccgacttcatcaaggtgggcatcggcggcggctccatctgcatcacgcgtgagcagaagggcatcggccgcggccaggccaccgctaccatcgaagtggcgaaggcacgcgacgagtacttcgaggagacgggcgtgtacattcccatctgctccgacggcggcatcgtgtacgatcatcatctgacgcttgctctggccatgggctccgacttcgtcatgctgggccgctacttcgcccgtttcgacgagagccccacgaacaaggtgaacatcaacggctcctacatgaaggagtactggggcgagggttcggctcgcgcgcgcaactggcagcgctacgacctgggcggcgacaagaagggcatgtcgttcgaggagggcgtcgacagctacgtgccgtacgccggctcgctgaaggacaacgtcgacctcacgctgtcgaaggtgaagtccacgatgtgcaactgcggcgcgctgaccatccccgagctgcaggagaaggcgaagctgaccatcgtctcgtccacgtccatcgtcgagggcggcgcccacgacgtggtgctgaaggacaagaccccctacgtgagcagcagcatccactaaacctgtctgcttggaacacgcactggaaacgccgcccggacgaacgggcggcgttttttttgcgtgccgagagggatgggggcttcgagggtgcccgagctcgttgggccgtgaggggcgggagcgcacgcgagtcgcgatgggagcgcgcccagctgcgatgctccggggcttcgaggacgggcgtgcgcacgggccgcgagggggcgtaacaagagtttcatgtggaacacttgtgctaaaggtgcggctctacggtggggtcggcgccgatgatggcgtgcagctcgtcgatgtagcgcagcagcaggtcgctcgggcggcgctcgttgtgcatgatgtagcccacctgcattgtctcgtccacgtccaacgggatgctggcgatgcccgagtgcatctcggccgacagcacgccggtggacagggtgtatccgttgtagctggtcagcaggttggtgagcgtgccgcggtcggagatgcggatgttgcgcttgtgcggcaggtggctgagcggctcttcggaatagtagaacgaattcgtagtgccctgctcgaacgagtagcgcgggtagtcggccaggtcgtcgggtcgcagcagcgtggcgcccgccagcgggtggtgctcgcccacgaacacgtgcacgcgcgcgtcgaacaggggagcgtaggccacgtcggcgtcgtcgaacgccttctgcagcacgcgccggttgaagtcgtcggtgtacaggatgcccacttcgctgcggaacgtgcgcacgtcgtcgatgatctcggccgtggtgctttcgcgcaggatgaactcgtactcctcgcccttgcagccttccaccacgttcacgaacgcctgcacgctgaacgcgtagtgctgcgtggacacggccagccgcaggtgggtggagcctttatcggcgtagcgcatctccagcatgtcggcctgctcgatcacctggcgcgcgtagcctagaagctcggtgccgtcgttcgtcagcgtcacgccgcggttgctgcgcgtgaacacggtgatgcccagctcctgctcaagctccttgatggcggtcgagaggttcgactgcgacgcgtacaggttctgcgccgccgcgttgatggagccgtactccgcgatggcgatgaggtagcgcagctgctgcaaggtcattgaagatgccttccgagttgggacgtcaggtggttcgatctacgttctttctctcattgtacccagctatctgctgaatcgatagcaaaccatcaaaacatcgaatgacccgaaaggttgtgtttgagccgcgttcgtggtttcatgcaatacgctgcattgcgcgcatatgtcctggtagcgaacgaatgtttcacgtgaaacattccgaagctcaactcggcggggcgaacgcgctggcagcgacgaaaccgcatgacgaacaaggagtaaccatggcgaaggacatcccctacgatcagaagtactatgatccggagatcgaatgcatgccgcggccggagcttgaggcgctgcagcttgagcgcctgaaggacatggtggcctacgcatacgacaacacggtgtactacaagcgcgcgttcgacgaggccggcgtgaagccgggcgacatcgaatcgctcgacgacatcgcgaagttccccttctgcgacaagaagacggaacgcgagacgcagcatgtgggcagcttcttcggtgagatgtgctccgtgcccgaggaagaggtcatcttcatggccacctcgtccggctcgacgggcgtgcccacggtcagccccttcacgcaggaggacttcgacctatggcaggacaccgaggctcgtttgttctggcaggcgggcatgcgcccgaacgaccgctacgtgcacggcctgaacttcgccctgtacgtgggcggccccgacgtcatcggcgcgcagcgcctgggcgcgctggccatctgggtgggtgccgtgccgtccgaccgcctgctgttcgtgctcaagcagtaccagcccaccatcatctggacgtcgccgtcctacgcgtggcacctcggcgagatcgccaaggagaagggcttcgaccccaaggaagacttcaacatccacaccatcatcgtggccggcgaggcgggtggctccatcaagtccacgcgcgaggccatcgagaacctctggggcgcgaaggtggtcgacttctacggcctgtccgatatctacggtgcctgcgccgctgcgtgcgaggcgcacgacggcctgcacatcgtggaggaccagatcctcgtggagacggtggatccgacgaccggcgaagtgctggctccgggtgagacgggcgagctggtgtacacgacgctgtgcaagaaggctcgcccgatgatccgtttccgcacgggcgacatcggctacgtgagcactgacacctgcgaatgcggccgcacgctggcgcgcattcacgtgaccggccgcaaggacgagatgttcatcgtgggcgccgtcaacgtgttccccagcgacatcgagtacgtggtgcgcggtctggacggtctcacgggcgagtactccatccgtgtgtacgagaagaacttcacctgcaagtacgaagtgtccgtggagcgctcgctgggcagcgacgagccgtacgacgaggtggcaagccgcacggaagctgcgctcaaggcgcacaccggcgtgcgtcctgccaaggttattgtgtatgatgcaggcaagctgggcacgtcgtccgaacacaaggcctccaggttcattgatgaacgtggctgcgttacgcgataaccccccgtcatcctgagcggagcgccgtaggcgcggagtcgaaggatcttgctgaaaggaaccacttatgactgttgaaaccaccttcgccgtttccgggcagcactacctgttcaacgtgcagacgttcgcccacaccgtgctagcgctgggcggcgacgcgtacgcctacgcgctgcgcgaccgcactacgcagggcgtcatcgacgacgtcgccggcgggaagagcgacttgggcgtgctgtttcagacttcggccacggctgacgaggtgaacgctgcactggatgccgcgggtctcgaattcgtcgagctcatccagtcggcgccgcgcgtggcgctgccgaagagccacccgatggtgaacgcctccagtctctcgctggaggatatggaggatttcccgtacctgtatttcgagcaggacgaggattcgccggtcgcgttcgccgaggaagcgctggccagcgtgccgcgcgccaagagcatcgcctgcaccgaccgcgcgtcgctgtccgagctgatcgtggcgctgaacggctacaccgtgaccagcggcatcctcgtgggcatctccgacggcgcgggcctgaacaccgtgccgctggacaccgacgtgaagctgcacctgggctacgtggtgcgcaagggcgaagcgctcagcgacatcggccagcgcttcgtcgacaccctcaagaagaacctcgagaagtacgcgcggttctagggtttcggcggcctgccggccgccgaaacaagccgacgctgcgggccgctctggcaccccatcttcgcgcgatcccgcaagctcgcgtaccgaagcatcccctgcggggacttcctgcggggcgcgtgtcgtctgcgatccgcaggtcgagcaacagcgaacggatgtttcacgtgaaacatccgcgggttgcgctctcgttcgcggcgcgtgaaccctcttgcctgcgcttgtcctaaaaggggacagccccttttaggacaagcgcgcgtcgcatctcggcgtttgctattgccgcttcgcgtccagaaggagcaggtcgactgctttgttccacacggcgacagcgtcgacgtccgcattctgcgccacgagcgtgctgaaacccgaagtgatgacgtacaggtattgcgccgcgttctcgacatcgaagcgcggggggagcgctccgatgtccgcgccgtgcttcaaaacggcggcgaacgcttcgatcgtggtcttcgtgagccgttgctgatgctgggctacggcgggtattctcgtcgcctgcatgtcgatttccgcgagaacgcgtcggcgctcttcgtccccgtggtagcttgcgaggatcgatcggcccatcgcatgcagatacgaatagtactctccccggtcgtcgatcgaggcgaattccgtatcgtccggatcgagcaccggatacaggcttttcaccatgtccaagaacagctcttctttcgatgcgaaatagtagtacaacgccggtttggagacgccgacggcggcacatacctggttcatggatgccttgtcgtagcctttttcggctaccaaggcgtacatggcgctcactatcttgtctcgagtgctaggttcgctcacagctcaagcctttcttcaaaaggggctggtacaacaatagcatatacgtgagcaggacggatatagttgctcgcctgctcgcccggttgccgcgcatctcctgtttttcatgttgacgaagggatcttcagttgctatagtactacttacttaccggtaggtaaacactatacgaagtgttggaagaggacgaactcgttcgcttcccatggcacggaggaggaacccgtgttggaaaactatcggcatccaggggaattcgaaccccaatcagacgttttcatggaatggattcccgacgcgtatcagatgaagggctacgacaacagccggtcgtgcgccgagatcgtcaaagcgctgcaggagttcgggggcgtgacgctccatatcaactgcggtgcggaaggcgttctcgaacgtgccaagtcgagcttggcggagaagggggtcgatacggccgacatccgcttcgtgcaattcgccgatccgaacttctatgtgcgggacaacggcccgacggttatggtggacgatcgaggcggcagaatcctgatcaacccgaattggagctactacggcacgctgccgcccgacgacccgtactgcgtgcagtcgcgcatcgccgccgtgcagatgggggtgtccttgggcatcttcgacgtggtgaattccgatgtggtgtccgaaggaggggatcgggagttcaacggtcagggcgtcatgatgtgcatcgaggacacggaagtgcgcaaacgtaatccgggtcttacgaaagagcaggtagaagccgaattcaagagactctacaacgtggagaagatcatctggatcccacagcctttgctagaagacgacgatttcaggatggggccgttggaataccgcgacggcgtgccgtacctcggctccagcttcgcggcccatatcgacgagctgtgccgcttcgtggatgcgaacaccgtcgtgcttgccgaggtgaccgacgatgaggcggcggaaagcgcgatcggcgcagagaacaaacgacgcatcgaagccgcctacgatgtgctctcgaaggcgacggacgtccatggcaacccgttcgccatcaagcgcatgcccgtgcctatctccatcgattacgtcttgaccgaggacgacgagaactacgggctgtacgaggggcccgtgatggagatgggcggcgccttcgccgacggcacgccgtggcccggcggccccatccatctcatagcctcgacggggtactgcaatttcctcatctgcaacggcgtggtcatcggccagcgctactggcatgaggggatggatccggcaatcaaggggaaggacgaagccgcccaagcggttctcgaggagtgcttcccggatcgcacggtggtgatggtggacagcttggcgctgaacatgaccggcggcggcgtgcattgctggacgaagaacgttgcggcgtccgagccgcgatgagacgggcgcgaacccgtatgacaaggcaagccgcgcgggtgttcttggcagaagccgcgcgacctgcacgtaaagcaaatctatagtatcagaaaggctcgaaactatgaacagcaaccttgttggacgcgatatcctgaacctacgcgatcttacgcccgatcagttccgctatctgatcaatttgtcatgggagctgaaggcccagaagaagtcgggcgtcgaccagcgtcatttctgcggcaagaacgtcgtcgcgaacttcatgtggagttccacccgcacgcgatgcgccttcgagacgtcgtgcaacgatctgggcatgggcttcacgtacctcaccaactcccatatgggctacgatgagagcatgaaggacgcgatccgcgtgctgtccggcatgtacgatctgctggtcatccgagctcagctgcgcgaggagttcctgtacgaaatcgccgattattgcgatattcccgtcatcaacgccctgacgctcgacgaccatccgacgcagatgctggccgacgcccttacgatggaagagcagtggggcggtttgggctcgagccgccataagacgatggcctacgtgggcaattgctccggcatgccgtatttctacggccgcctgtgcgccatcctgggcatgaacctgcgcgtgatcggacctgagaacccgcgttaccgccttcgccagccttgggtcgacgagatcgccgagctttacaagcgttggagccctgattgcgagttcacggtgacgaccgacgcgtccgctgtcgagggcgtcgacgtcatcaccacggaagtttggcgctatcgcagccctgatgtaagcgatcaggttctcgatccggaggcgtacgattcttggatgggcgacgtgaacgatctgcttccgtaccgcgtttcaagcgaattgtgcgagcgcacggggaacagggacgtgttctgcatgcacgagcttccttccgtgcacaacgcggagcacgagataggccgaaaattgctcgcccaggcgccgaacgattttgagcgcacggtcatcgaggaggggctcgagatcaccgacgagtgcttcgaaaagaacgcctcggtgatcttccgcgaggcggaaaaccgtcagcataccatcaaggcgatcatggccgctgtgctgggattgtaaaagcgcatgccgaagccgttttgcgcgccgtgtccctgtgcggtcccaagcaagggccggcgcgcagaacagcggtttcgacgctatcgtttgaagggaaacgatacttatggaaagctcgcatgctctgaagaactcaggaaagttcgcttggatcttggtgctcggccttggactcatgtcggcgggcacaaccggttcctatagcgtcgtcgcaggctgtttcatgacgccggtctgcgaggatctgggaatcgactacaacatgttctcctactatttcacggcaacgctggtgggggtcgccgtcggcatgatgtgcgtcggcaagatcttgccgaaagtggtcggtcggtggacccatgtcgcggtggcagcggttctactggcggctggcgcggccatggcgttttactcgaatgtctggctgttcctgctttcggggctcatcatcggattcggcatgtccttcaccacggggctttgcatgtcagccgtcatcgatcaatggttcaggaagaaggcgggcctcgccatcggcttggcttggacggtcaactcggtgtacatggtcgtcatgagcccggtcatcaccgccgtcatcgaatctgtgggttggaggaacgggtacctggtgctcgctgccgtctcggccctcgtagtcataccgtctatcgtgttcatcatccggttcaagcccgcggataaaggcatgcttccctacggttacagcgaagccgaatcgatcggtcaagatgcaggggtggaaatcgcggccacgcgaggcgtgccgttcaaggttgcggtgaagtcgcccgcgttcatcgcctgcgtcttgttcctctgcctcgtgcagatcaccgtgtgcatgaaccagcttttcccaacatatgcagtggaggtcggccttggcgcgatgacgggcggaatcatggtttcagctgcgtccatgttcgatatcttcctcaaccctgccgtagggtcctcatgcgacaagctcggctcgttcatagccctggtgctgtgggtagtcgtgagcatcctgtcgttcgtgatgctcatattcgcagctggccaaccgtggctcgccattctgggagcaggcgtgaacgacgttatgtacgtggtggccggagctggccttacgtgcctgctcatgagcgtgttcggctctcgcgattacggtcggatcttcggtatcgtctgcggcgtggcttatatcgccggggcgttcggcatgcccatcatgaccgctgtctactcggcaactggaacgttcaatgcggtgttcgggctgtgcatcgtcatgaatgtcgccataatcggattgatcttggtcatcaaggctaccagcaagaagctgcagtgggtcgagggagaggacgaaacgcctgtcgctctgcattgagcgctaacctggggcggtgcgccttcgaattagaggtgcaccgctctgcgcgctactcttgtgcaagtcctccgtcgtccataaagacatccgcacattcctgcttgaaaccgacaggctactgaagtaacgggtcgtcgtcctcgtcgagcgcgcgatgcctgccggccaagtcgagggcgtcgtcgctgatgggcggcgcgccgtgagcgccccacttcgcgcgcacctgctcgcggcgggcgcgctcggcacgcgcctcgctgggacgcattggccggggcatctcggccgttgccgtcttttcgtgcgacagcgccatgcggatgcgcatgtattcccagatcagcagcacgagcaggatgcacatcacgatgaggtagccgatcacggcaccgggcagcccggtgaagttcactagcaggatgggcacgaacaacgcgaatccgaacgtgatcacgtacagcttcgtgacggagcgctgctggcgcagcacggtgatcacttggtacaggaagtcgatcgccgccgtcacgccgcccgctgccagcatgatgtagcatagcccgcggaattgctcgaagtccacgccgtacaagaagctcatcacgggaatgccgatccatgccatggcaagcgccgtgacgccggtgaccgcgacgatgaccgccatgatcacgacgatgatcaggtcgaaccgcttgcgcttcgcagggtcggcccacacgttcgccatcttcacgagcagcggcttgtagatgaacccgacggtcagcaggatgccctgcgcggggaagtacagcgcgttgaagtacagctggttgtcgtagctcagtacgccttccattacgaacttcggcatgttgtcgatgaatgcgtacaagaacagcgcgatgaacagggggaagcactgtttgaacaactcgacgatgctgccgacgttccaacgtttcgaccttggcgtctcgaacatggccagcgggaacgtgagcacgatgaaggtggcgaacgccgcgacggccatgaccacgcacgacacggccaggttgcgggtgatcagcaggcacagcgagaacgccacgagcaccacgacggagcggaacgcctgcgacacgcccgacagatacagcttgtccacctgttgcagccgcccctcgtacacgtcggccaggccgtctaccatcttgtagaggtacacgcccaggctgatggtgaacatctggctctcgtagccgcgcaccgtgcagtacaccacgccgacgagcaccatgaacgcgcaggtaatccaccggttgatctgataatccgagaacgaatgctcctcggtcacgtcggacacctggtaggtgcgcacgccgtagttggccaggatcatgagcagcgtgccggtgacgaacgcgagcgagaacatgcccgcctgctccacgcccacgagctgcgtgaccacgacggtgagaatggggaacaccatgccccatgcgcccacgcccaccgtattccacacgtagtcgcgcgtggtgcggtgcgcggcgtactcttcctcctggtcggcaagcgagcgctcggataccgcgcccagcaagcggttgcaccagcggttgacgcctttcgtgatgaagttgggcttacgctgcttgctggttgcctggcgctcacgcgaagaagcgccgaggaacggcgtcgtgtcagatggcgcgggcgtttcatcgatcacggtgtcgtcgtgcaagggctccgtcggttgttttgcgtgcgaaccgtgtttggtgtcgttgcgcgtaatgcgatccatgatgtcgcgtcaggctccttcgctgcgtcgcatgcccattctctctcaaggagcattataagttcgcatgtgggcgctacgccaagattcataccagcagcaaacggaagcgctccgcttagcgaatccatggcgcgctcacgtggatgcggaaagagacggaaagcgcgaggggcgagaggcgctctgcccaattgggggagtttgacggcatgtgggcgagcgcgaagccgtccgcgctcgtgcgcagcggtatacttgcatgaccaacgtgcaaagatgcgaaggggagagtccatgatcgaaatactgtggcacggtcgcggcggccaaggcgccttcacggctgcgcggctgctgggcgcggcggcatcgctcgacgacggtcggcatgctttggcgtttccgtcgttcgggcccgagcggcgcggcgcgccgatgcgggcgttcacgaagctgtctgacgagcccatcggcgaccgcagcgccgtggcgaaggccgactacgtgatctacctcgacgatacgctgctgggcgagggctgggaaaccgagctgaagcccggtggcgtcgtgctggtgaacagcgtgcgtatgttcgacgacgagcgcatcgcggcgctcgatgccgacggcatctcggcggccgttctgggccgaccgattccgaacacggtgttcctcggcgcgctgtcggcgctgtgcgatcgggtgagcgtcgagaacgtgcaggaagccatccgccagtacatgccggcgaagctgcatgcgaagaacatcgcgatcgtggatgcggcacgggaggcgatgggcgaagcccaggagccgcgtgaagaggcccctggtcatcctgagcgcgcgcagcatgaagacgaaggctcccgcgcgacgccagctgaaagcgctccgagtctgaccgcctgcggcggctccgctcaggacgacgtcgtcgtatctccgcgtcctgcgtctcgcatccccgcccttcgctccgccaatctcgaccctgctgacttcgcgcattccacgtgcttcgacgcaggctaccttacggtgaagaacgccggctggcgcaacatgcgtcccgtgatcgacgcggcgtcgtgcacgggatgcctccagtgctacctctactgtcccgacggcacggtgtacaaggttccgtcggcttgccagccgacggaagcagccgacgctgcggcttcccccggcacccgatctcgcggcgatgccgaaggctcgcgtaccgaagtatcccctgaggggacttcctgcggggcgcgcttcgcctccgccatccccacgatctcggacaccggggaaacgctcgctgactcactgggcgaacctgcgtgcgcgtccatgcagcccacggctcccgtcgccatcgacctcgacttctgcaagggctgcggcatctgcgcgaaggcgtgcaagttcaactcgatcacgatgatccttgaaagcgaggcggatgcccgatgaaacggttcctttccggcgacgaagcgttcgccgaaggcgtgcgcttggcgcgcccgcaggtgatttccgcgtatcccatcacaccgcagacggtggtggtggagcgactgagcgagatggtcgaggacggctcgctggccgccgagtacgtgcacgttgaaagcgagcattcggcgctgtcgtgcgccatcggcgcgtcggctacgggtgcgcgcacgttcacggccacgtcgagccagggtttgctgtacatggccgagtgcctgacctacgcggcgggcggacggttccccatcgtgatgatgaacgcgaaccgcgcaaccgcgctgccgtggaacatctacggcgaccagcgcgactcgctggcgctgctcgaccatggatggatccaggtgtacgccgaagacaaccaggaggcgctcgacctggcgctcatggcgtacgcggtggccgagaaccctgcggtggcaacgcccgttatggtgaacctcgacgggttcgcgctcacgcacacctacgagacggttgacgtgcccgaacccgccgaggccgacgcgttcctgccaccctacgagcctgcgggcaaccggttcgacttcgagcatcccgtgaacatcggcttctcggccggtcccgagtacaaccgctacttcaagtactgggagcatcgcgacatgctggacgcgcccgctgtggtcacccaggtggagcagcggttcgccgaggtgttcggtcggcagtatcccggcatgatcgagacgctggactgcgacgatgccgatgtgatactggtcacgctgggatcggcggccgggctggtgcgctcggtggtgcggcagctgcgcgaccagggcgtgcgcgcgggcatgctgcgcatccgctacctgcgtcccatgccgagcgcgctcatcgccgaggcgctgcgcggcgcgaaggctgtgggagtgctggagaaggacgtgtcgttcggcgccgagggcaccgtgttcacgaatgtgaactccgcgctgcagcaagcggccgtgggcgtgcccacgtacaacttcgtgggcggcttgggcggcgacgatatatcggaagcgcaagtgcatggcatgtaccgcatgctcgtacaggcggccgaggggacgggcgagctgccgcgcgtatcgttcctcgggatcgattctccggcggatgcgctcggtgcggaaagggggcggtagccatggccgtcaacgccaagaacatcacggacgacgagttcttcttcggtcataaggcgtgcgccggatgcggcgggtcgttggccgtgcgcgcggcactcaaggttctggggccgaacgcggtgtgcgcgctgcctgcgggttgcatgagcgccgtcggcttcaacttcccgcagctcagcttcgccaacaacgcgatgatcacgccgttcgcagccacggccagcgtgctcaccggcatcgaggccggcctgcgcgcgcagggcaagaaacccgacgattgcacggtggtgggcttcgcaggcgacggcggcaccgccgacatcggcatccaggcgctgtcgggcgccatcgaccgcaacgacgacgtgctgtacatctgttacgacaacgaggcgtacatgaacacgggcatccagaaaagctcgctcacgccgttcggcgccaagaccaccaccacgcctgccgggtcgaacatgcgcggctgcctgacgcagaagaagaacatgttcgagatcgtggccgcgcacggcattccctatgcggccacggcgtccatcggctacctcaacgacttcatgcgcaaggtggagcacgccgcctccattcgcgggacgaagtacatccacgtgatggcgccgtgcccgacgggctggggctgcggcgtggacgagacggtggacatctcgaaggacatcgtcgactgcggcctgtggtacctcgccgagtacgagggcggggcgttcaagctcaaccgcaacccgcgcgagttcgccagcgtcgaagcctacctgcgccgtcaaggccgcttcaaggctcttaccgacgaggatgtcgccagcgtggttgccgcgcgcgacgcgaaatgggaggtcatgcggagagactgggcgtagcgagacccaatatcggcacgagcaagatgaagggcgtcgtttgcagcggcgcccttcatttttatattctatcggatacaaaacaaatcatatgatatactcctaccaatcaaacgattgataggaggactcatgtcgaaggatttgacggctcaagacatcaagcgcattcgaaggaagtacggcttgacgcagcagggtttcgctcgtttgcttggattgggtgaggcgagcgtcgtgcgctacgagaacgggcagacgcccagcaaggcgaacgcgaacctcattcgcgcagccgacaacccggccttcatgcgggattgcttcgaacgcgacggagatttgctgtcgcacgagcagcgcggcaaggccgagcagatcatctacgctctggtaaccttcgacgaggacggggacatcatggatattaacgaaatgtacgaaatcacgctgcaacaagaagtgctgaacgaacaggctgcgcaactcatgggcgatacgatcaatttgcttcttgccgcacgtgagcaagaggatgcgattgctgaagcggtgtacgaagatgtacttaagcagatttctcacatcaagccacgcatcatttcagaagggcacttgaatacagtgaggctttcagaaatcagagggcaaatcgaatgtttgaagaatatggtggatagtcgtcaagctaaggcagcttagtatgacggatctcgaaagctattcggatagagaatttcttgcagcgcttaagccgcttatcggtactcttgttatcgacaaacggctagctccgtcagataacccgcgtgcggttttgctaggaggccagagcggtgcgggcaaaacaacgctgcacgatgtctttcttgcacttgaggaaaacaatgctattgtgattaacggtgatgactaccgctccgtccacccgcggtttcgtcagatctgcgcccaatacggcatcgactcgcctgcacatacggcggcgtgggccggtcggatggtcgaggcgattgtcgatgcgctctccatcatgggatacaacctcattatcgaagggacgttgcgcacgtccgaagtccccctgaagactgcgcggctcctacgtgatcgcgggtatagcgtatcgctggcgctcatggcggtgaagccggagatatcgctcatcagctgccagttgcgatacgagcagatgcgcatcgccggaacggagccgcgcgcggtcgatcctgcccatcacctttccatcgtcaagagcatcgtcggcaacttgaaggtgctggaagagtcgggcatgttcgacgatatcggcctgtactcgcgcagcgagcagcgcctcttctctagcgcggacgatggtgggcaagcgagcgaagcgctcgagcggatcctcttcggagcatggaccgccgaagaaagcgctcactacgaatatctcaagcaacgcctcgaacaagcaagagccctcggctagcttcctggttcggggtcgaacgagtctacgaggtcgatgaggtcctgctttttgtggatgtcgagcttggcgtagatgcgcttcgaatgcatgcgcacggtgttctcggagatcaccagctcctcggcgatgcgcaccacggtcttgccgcgcacgatgtgctccatgacctcggcttctcgtgcgctcaggcggaactcctggcagatgcgggccgcctgcttggagatgcggtcctggtaaacaggctcgccatcggcatgtttgcgagctggtcggacggttccctctcgctttgcggaaccgtcgggcgtcggtcccagtgacacgagctcgacgtccggaaccgatcgatgtgcgccgcgcaaggcgctatggaagccgccctggccgaagaagtacatgaatcccagcaggtacccggtgccgagcgcaaccacagcgtgcgacgacagccccggaatggccacctgtcccgcaagcgttccgccgatgaaccctgcatcgtgcaaggcgtacaccacgccgccgaagaacccgtacacgaacacggggttcgtcccgtggtcgcgcgacgactgggcacattggatcatcatgagcatgatggtgacgctgtacgccgcgtacaagacggccgcgagccaacgggcgtagacgtcgcccagaaacgggagcagcacgaatccggtgatgatcaccggaaacacgatgcggaacagcgaaactacgttgagccgcacgctcttgaactgccacagcaccatgaacgcgacggcggtaaccagcgatgcgcccatagacaacgcgttcaccagcgatccgatggccggatcgtcgatggccagcgcgcggatgagccccgcgcacaacccgagtgagcccacgcacggcgccgggcgcgcaagggtggagattgcctggcggtacacgcctctgttcttcttcggcacgtcctcgaacatgggctggtcgaaattgatctcgcggctcttcaacgatatcgccagagcgaaaaacggtgtgataaccagaggaatcaggtacacggtgaccgcgcgggggatgaggtgcagcgcgaagtatagcaccgaagcgtacgcggtgccgaggatgaggtcatggttgcccgcgtccgagtcctggcttgcgaacagtcgttgccacagcatgtagaaaccggccgatcccacgccgatgaacccgccgcccgcgatgacgaggggcagcatccatgcgtccagatacatggcgccgataaggcagaaccatcccagcagatacggcacggccgacaacctgacgatgaacaagcgcgtgggccccggcagatggtacgagcctactacgctcaaaaagaagcaggcggcgaacacgagcgactgcacgaggaagaaccagaacagcgtctgcggttcttgaagcttcatcggcaagagcgggaacacgccgccccacgctccggcggcattcacggcaaggaacgacgcatagccgaacagcgtggtattcggtttgaaagcgcgcagtacggtcgtcgcgttcactacgatcctcccctggatgatagccttcgacgggtagaatatcccctgcatcagtatagcgggggcgctggcgcgaatgcgggggaatccgatagcggtttcgcacatcgtgagcttctgaacaggctaaactaaaaatgtacatatttcatgtaacacgcggttccggtgatcgtcctacaatgcgcggtgtttcgtccctacgaaacgcatgagcagacgagggaatcaaggagggatcatgacgaaaacgaaagagcatgccgtttctcgccgcacgttcgtgaagggttcggccctggccggcctgggcaccgccgcgctgggcacgggaaccctgttcgcgtgctcgccgcagcaagaaggctcagggggcgacgctgtaagcaccgagccggtggaggaacagatcgtctggacgcattgcgcggtcaactgcggcagcacctgcgcgctccagtgccatgtggcagatggcgagatcaagtacatagaatccgacaatacaggcagcgctgaaatggatcagccccagctgcgcgcctgcttgcgcggccgttcgttgcgtcgctggctgcagagccctgatcgcctgaactaccccatgaagcgtgtgggcaagcgcggtgaggacaagttcgagcagatcagctgggacgaggccatcgacaccatcgctagcgaactcaagcgcatccgcgaagcgtacggcgacgagtccatcaccgtgcactatgcttccggtgtgtcgtcaggcttgatggggaatgcggtggtgaaccgtcttatcaacttgaacgggggttgcttgaactattacggctcgtacagctcggcgcacatttcggctgcgggcacgtatacctatggcggaggcacgtacggcagcaactttctcaccttgcaggacaaccagctggtggtcatgttcggcaacagccctgctgatacccgtatgggcggcgctggccatacgcacgatttcgcatggatgcgcgaggagaagaacctcgaagtcgtcaacatcgattgccgcatgaacgacacggtgtgcggtcagggcggcgaatggattccaatccgccccggaaccgacggcgcgctctgtgctgctctcgcctacgagatcatcaacaacggctgggcagacgaggagttcctgcacacgtactgcgtaggttacgacgaggagacgatgcccgaaagtgcgaagggtcagaacaagtcgttcaaggactacattttgggtaccggttacgatatgacgccgaagacgcccgagtgggctgcgcctatcaccctcatccccgtcgccaagatcaaggaactggctgaaaaaatcggcaccaccaagccagtctacatttgccagggatacggttcccagcgccatgctaacggcgagattacgtctcgcgctatcatgatgcttccccagctggttgggcagattggtctgccgggcacctcggacgggcgtcgcgaaggcaagtcggccttcgcgctttccagcttccctgctggcgagaacccggtgaagacgaacctcccgacgttcatgtggcctgaagccatccgtcgcggcgaggagctgacggcgctcaatgcgggtttgcagaaggccgagaagctgtcgtccagcatcaagttcatcttcaactatgcgggcaacacgctgacgaaccagcattccgacatcaacgggacacacgacctgctgcaagacgagtcgttgtgcgagttcatcgtgacgagtgaagtgttcatgaccgattcagcgaagtactccgacatcatcatccccgatctcacgctgcaggagcagtacagcctgtcggccaacgggtatgcggacaacatggaagctatcgtgtacggtagcccggtgtacgagccgaagttcgagcgtcgcgggatctatgaggtgtgtaccgacatcgctgataggctgggtatcaaggatgagttcaccgacggcggaaaaacgcgcgaagactggctgcgccagattctcgacgagtcgcgcgagaagtaccccgagctgcccgattgggatactgggatggagcaaggcgtatggaagcgtacccccgagccgacgatcagcctcaaggcgttcattgacgatccagcggcgaacccattgaaaaccccttccggcaagatcgagatctattcagagacgctcgccggcttcgccgacacgtgggagttggctgaggacgaggtggtcagtcccatccccgagttcgatcccggtttcgagagctacgtgaacctgaccgacgaatacccgttgctcatcacgggcttccattacaaggctcacacgcactcctcctacgctaacaacgagatcatccaggctgccgcgcagcacgtggcgtgggtgaatccggtggatgccgagcaacgcaagatcaaagacggcgacaccattcgcgtgttcaacgatcgcggcgagatccgcatcgaggccaaagtgacgccgcgcgtcattccgggcacggtggctattcctcagggcatgtggcacgatgccgacatgaacggcgatcgcatcgaccatggcggcaacatcaatacgctgactatctatcgtccgtcgccgcttgccaaggcgaatccgcagcacagcaatatcggccaaatcgcgaaggcctaagggggtagaccatgactcagtacggtttccatttcgacggcacgcggtgcacgggttgcaagacgtgcgtgctggcctgcaaggacaagaaggacctctccaccgctatctcgttccgcaacgtgtacgaatacggcggaggatcgtggaagcaggatgatgcgggcgcgtggacgtgcgatacctacgtgtaccacgtctccgtcgcgtgcaaccattgcgatagcccggcttgtatggcgaagtgcccgcagggggccatctcgaaggaccccgacacgggcatcgtgaacaacgatcccgagaagtgcatcgggtgcggtacgtgcgccatcgcgtgcccgtacagcgcgccgaaggtggacgaggagataaagaaggcggtacggtgcgacatgtgcgccgatcgcgtggccgagggcaagcagcccatctgcgtggaggcgtgcccgctgcgcgcgctcgacttcggcgagatctccgagctgcgccagaagtacggcgagatggccgacatcgccccgctgcccagcgccgacgagacgaagccgaacatcgtgatcaccgagccggtgaacgcgaagccggctggagatacgacggggtcggtgctcaacgagcgcgagatcgcgtagaatcttctgagcagtatcaagcgggtgccgcgcggtctgacggcgcggcacccggtgcgctgcagggggacgcgcggcgcgtcggcatggccgacgatcgggggaggacacggtggagcaattcggtttctacttcaacgcgaaacgatgcacgggctgcaaaacgtgcatgctcgcgtgcaaagactaccgcaatctggacgcctccgtgtcgtttcgccaggtgtatgagtttgtcggcggcagctggtcgaaggacgagcgcgggtgctgggcgcaggattgcttcgcgttctacgtgtcttcggcgtgcaatcattgcgcgagccccgcctgtatggaagtatgccccacgggtgccatgggcaagaacgagctgggactcgtgagcgtggacgagcatcggtgcatcggctgcggctactgtgcgctgtcgtgtccgtaccatgcgcccaaggtcgatcggaccgtggggcacagcgtgaaatgcgacggatgctctcaacgtgcgcgagaagggagcgctcccgtctgcgtggaagcttgtccgctgcgggcgcttgagttcgggcctatctccgatttgcgggcgcgtcacggtcgtgtcgccgacatgcccccgcttcccgattcatcgaaaaccgcacctaatttggtgttgagccttcctgtgcgcttggaagaggacgagagccgcgtgcttgcggaaggcgcggtttgcaatattcgcgaactagtgtgaggggagcacctatggacgatcgcatggatgccgtcaaggcggaactcgaggccgtgtctttcgtgggcgagacgctcgccccgtttttcttgcaagatccccgcaccggcacggcgggcgctgcgtttcaggcggtggcgcagctccgtgcacaggaagcggctgatgcgtggcctttcgccgacggggctgaagcgcgtcacgctttgagcttgatggtgaacggtttggccgacggcatcgacgccgacgacctcgtgtgggagtaccgccgtctgttcgtcggtcccgctccgaagccggccccgccctggggctcggtgtacaccgaccgcgaatgcgtggtgttcggcgagggcacgttggagctgcgcgcgtggatgcgcgcgcacggcgtgaggcgcacgaccgatgagcgaacccccgaggatcacatcggcctcatgctggcgctcatgtcctaccttgcgcgcaaccagcccgacgacctggacgaattcttgcaaatccatctgcttacctggtcgtcgcacttcctcgaccagctggtcgaggcggcggatcacccgttctatgaagggctcgcccggcttgcgaaggcctcgctcgaaggcattcagcaagcacgcgacatcgacgtgacgtatccgcgcttctatcggtaggctttggcgatgaccggctttgccaccgcgctcaacgagatcacgctcgtgttgttcaccacgctggccccgtcgggcgcggtggcgtacgtcatcatgggcatggcggcgctgcgcgcgcagggcgacgagcgcaagcggctgagcggtgcgcttctcatcccgtttctcgtgacgctggtggggctcgtcgcctcggctacgcatttgggcaatcccgataacgcgctgtacgtgttctcgcgtgtaggtgcgagcccgctatcgaacgaagtgtgcgcggccgtgttgttcctgggcatatcgggtcttcattggctctaccagttcgccgagcatgcgcgccagcgggtgctgaacgtgctgctgggagcggccatggtcgcatcgctcgcgttcctgatctcggtggcgttcgcctacgccagcaggacggtggtcacctgggacacgcccttcgttcccgtcgcgttgtgcttgaacgcgctggtgggcggcccggttctgactcttttctgcttgcggttctcgcggtggtcgccgttagaaagccgggtgggcgggatgctgctcgccctctcgtccgcagctctcctagcgaatgcgggcgtgtacgtcgcccaaggcatgagcgtacttacgatgagaaactaccttgtgtccgcagaacagcttgtaccgacgtatggcgcgatggcgacggttttcttcctgcttgcggtagccggggttgcagtggacgctcttccgctcatgcgcgggcgcggcatctcggttgcatcggccgccatcgcgtctgcgctggtgttcgccggcatcttcgtgatgcgtttcgcgttctacatgatgcatatgacctacggcatcagtttatagcgctgttggcgtggtaccctgctggggacagacccggttgaaggagtttcgatgatcgcggatgcatccgccaaagccgcccacctgcgaacaatgagcaccctcgtcgtgccttgtgttgtcgcctctctggaggcttagagggtatgcatctgtcgaacacgatgctcgacgtactgggcactgctccggtggaagcggtcatcatctacacctggagccgcgtgctgcatatgcgcaacagggccgcattctaccttcttatgtcaagctgcatgctcgtggtagtgttgacgcgcggcgatgcgggaacagggatgcgcttcgcctacctcgtgttcacgggaggcgtgctgcccttcctcatggcagacgagcgtcctgcgcgaaaagtgttcgtcattgcgctcatgaacgtggcaatcatgatcgccgaagtgctggggacggcgttgtggtacggcatgacgggaatcgacatcatcgattacgacaatacgcgggcgcatctcggagagttcgcgattatgcacgcggcccatctcgtcttgatgatagcgctgttcgccgcgctgcgcctcgctctacaacgcggcgagtctgcgggatcgatgaatttgcggctgttcctctggtttccggtcgtgcaggctcttctgctgacggttcccctgattgcagggtgtatgcccgcctgggttccagcatgctcttctacggcatgtcggtgcttgcgatcgggtgcttcgtcgtggatgcgatgctgttcgcttcgatggaccgctacgctcgcaagcggcatgaggatcagcgagccgcgctgttgcagggtcagctggatgcgtgtcttgcgcagtgcaatgcgttcgtcttggaggtcgagcagacggcgaggatgcgccacgacgtgcgaaaccaggctcatgcggctatggtgcttgccgagagaggcgactatgcgcgcgcccgtgatcatatatcatcgtttcggtcattatatttgccgaagtgaccgaaaaacccggaaggggcaaaaggcttcatcgtatataatctcgtggagcgcagcacgcttatcccctccatgcaaaccagagacgttagccgatgccatgtaccaggtcgtaatagtagaagacgatgccgcccaagccgagatcatccggagcatgatcgaatgctccccgcgtggcggcgagctcgccatcgagcatgttgtcgacgccgaatctttgacggcgcgtcttgcggaggaaccggccattgacgttctcgtgatggatatcgagctgggctcggaagacgcgaacggcatcgacctcgtgaagcggtatttccccgcagggtgcggcacgcaggtgatctacgtcaccggcttcgtcgaatactgcacgagcgtgtaccgcacagagcatctgtattttctggtaaagccgttcgcgcaggacgacttggacgacgcgctgagccgcgcgctcgagcggctcgaggccgactcgagcaagcccctgagcgttcggcttggaagcagggtagtgcttgtcgagccgagcaggatcagctatatcgaaagcgatcggcgcaaagtacgcatccatgcgggagccgaggagatcgaagcgtacgcgtcgttgtccgacctcgctgccgagctgcccgcttcgttcatccaatgccataagagcttcctggtaaacatggatcacgtcaaggagctcaaagcggacagcgtggtgctctcgtcgaaccaggttgtgcctgtgagccagaagcgccgcaaattcgtgcgcgaagctgtcttctcgcgcgtgcaatccaagctgtaggacggcgaggctctcgtatgcccgatgctctcctcgacatcatcggggtcgttcccgtgcaattggtgttcgcctatgcgctcaccaagatgctcaatattcgcaggctctacctgttctgggtgctggaacttgttttcgtgctgcttatctcctcgtttcgttcaagcatgagcgtcgagttcagattggcggcctccgtgccgctcgccctcattcccatattcctatcgcagggaagcctcgcgcgcaggattctcgtcgtgacgctggcgcatctggtgcttttctttgcggagctgcccggcggcgccctgtggatgtcgatgaccggcacgccggtcgccgattacgaggccgttcgaacgcatcttggcgcttttttcctgactcatgcggctcatatggctctgctcgttccgcttctcgcgatgctctgcatgctgctgaaccgtttcggcagcgctcaggaacggggaatgggcgaatggctgcccgtgcttttttccttggtacagcttgttctggtgaacgtgatgatccttttaccgctcggctacatccaggaatcgatgacgtattacggcgcaagcgtggtgctggcgcttgtcggtttcgcggtcgatctgctgctgtttgaggctatgggtcgcttcgcccaaaagcggcgcgacgatgtccgtgcgacgatgctcgaagagcagctggatcggtatctcgcgcgttgcggggagttcgtttcggacattgagcataccttgaaggtgcggcacgatatgggcaaccacgtacaggtggtgcttgccctgtcggaacgcggcaactttcaagaggcccacgaacatcttgcctgcatggccgaggtgcttaacgatacccgccgaagcgaggaggcagtcttatgatcgtgcggatgatcatcgcggtaggcgtgctgctgctgatgtgcgcgattatggcggtgctggcgcgccggctgcgcggcgtgcccccgacgcgtcttttgattaaccttttgttcccgttcagccagctgtgcatcgttgcgttcctcttttattatgcgattgcctacgagctgcctttttggatgttcgcgctggtcgcggtcgtgggcgccctgtgcggaccggtcgatctcgtgctgttcaaagcgttggaggagtccgagaagcgcgagctgtcccgcgagcgtgtgcgtctgctggaagagcagttgcaagcgcaggaacagtatttgcggcgtttatcggcggacatcgatgaagcgcgccgcgttcgcgaagacgtcgcacgcgagctagcggcggtggacgatctgctgcaacggcaagaggccgaacaggcatcgcgggggctgatgaaggcggtcggcatcatggattcgtcctgcaagcgctcgtgcgagcaccaggtggtcgatgccctcgtctcgatgaaggctgccgtatgtgcggagcgaggcattcgactcgagctcgatctggcgctggccgacgatgtctctctgccgagcgtggagctgtgcgcggtgttctcgaacctgctggacaacgctgtcagcgcatgcggcaaggtgccggagggcgcgcggttcatcaagctgaaagcacgtgtggatgccggctatctggcagtgcggatggagaacagttgcgcgccggctgaacctggcgaggcccgtcgcgctccgcgccgttcgcgcggcgaccgccttcccgagcacggctggggcctgaacatcctcaaaaccctcgccgaccgtcacgacggcacgttggaaaccgtgcaggaagatggcgtgtaccgcacaacggtgttgctgaaactggatgcaaggtgaggtgggatatgaggttcatcgtttctcctgctaagaagatgaacgtggtcgacgatgcgtttggatggcgcgatctgccgatgttcgcggatcgggctgcgcgtctggccgatgcggtgcgggcgctctcgtacgacgaggcgaaggcgctgtggcagtgcagcgacgcgctggccgaactcaacttcgaacgcttccgcacgctcgacgtgcgctccggcgcgttgacgccggcggtgctggcctacgagggcatccagtaccagaaccttgcgccgcaggtgatgacgatggagcagttggattacctgcaggagcatctgcgcatcctctcggggctctacggcgtggtgcgcccgctcgacggcgtggcgccgtaccgcctggaaatgcaggcgaagctcgcggtggacggcgcgcgcaatctctacgagttctggggcgacagcctgagccgcgtgctcgcggccgaaacggacgtcatcgtgaacctggcatcggtggaatacgcgaaggccgtcgttccctctgcggatcgctgcggggcaagagtgctcacctgcctgttcggcaccgtcgacgcgcgcgatcgcctcgtgcagcgctccaccgccgcgaaagccgcgcgcggtaccatggtgcgctggtgtaccgagaacgccattgaagaacctgccgacctgcaagccttcgatgcgctcggctacgcgttcgatcccgctcggtcgaccgacgattgctatgtattcgttcagaaatagccatgcataacctcaaataatcaaacaaacggttttgactcgaattgatgactcctctgcgcgcaaagctttgcgagaggttctcgtgaaccgcctgacgaatgcggaccaccatggacgacgaggtcttgtcgtgctgcgcacgccggagtgcatcgagctttcgaatcccggcggttttcgggtggatgtgaaagccgccatttcgcgcatcggacaatatcactataataggaacattcgcgaacaatcggcccttcgcgcggacgcgcgcgggagggcgctggcctgacgaggaaaaccaatgaccatgaaaccgtacaacccgcacgagatcgaaccccgctggcaaaaggagtgggacgacgccgacctgtacaaggtgaccgaggatccctcgaagccgaagaagtacgtgctcgagatgttcccgtacccctcgggcgacatccacatgggacacgtgcgcaactacaccatcggcgacgtcgtcgcgcgctactacaagatgcgcggcttcgacgtgctgcatcccatgggttgggacgcgttcggcctgccggccgagaacgcggccatcaagcgcaacagccatccggccaaatggacctacgccaacatcgacacgcagaaggccagcttcaagcgcatgggcttctcgtacgactgggaccgcaccgtggtggcgtgcgaccccgagtactaccgctggggccagtggatcttcctgcaattctggaagcgcggtttggtcgagcgccgcaacagcccggtgaactggtgcccgaactgcgcgacggtgctcgcgaacgagcaggtcaccgagggcgagtgctggcgttgccacggcgcggtggagaagcgcgacctcacgcagtggtacttcaagatcaccgactacgcccaggagctgctggacgacctcgaccagctggacggttggcccgagcgcgtcaagcagatgcaggcgaactggatcggccgctccgaaggcgccgagatcgacttcgtgctgtgcgggcccgacggcgaggctccggccgagccgacggccgacgacgtgatcaccgtgttcaccacgcgtcccgacaccttgttcggctgctcgttcttcctgctggcgcccgagtacaagggtcttatggagctggtggagggcactgaatacgaagccgccgtgcgcgaggtggtggaaggcgccgccaaggtgagcgccgtcgagcgcgcccagggcgaccgcgagaagcacggcgcgttcaccggccgctatatggtgaacccggtgaacggggagaaggtgcccgtatgggtggccgactacatcgtcagcgactacggcaccggcgcggtcatggccgtgccgtgcggcgaccagcgcgacttcgagttcgcgcgcaagtacgacctgcccatcattcccatcatcctgggcgaggacgatccgctgtatcccgagctcaacggcgtgcaggagcgccgcgtgacgtcggtcgattgggaagcggcctacgatgccgaaggcgtgctggtgcagtccggcaagtacaccggcatggtgggcggcaagcattcgcccgccgtcgatgcgatcatcggcgacctcgcggccgagggcaagggcaagaagaccgtgcagttccgcctgcgcgattggctgatcagccgtcagcgctactggggcaaccccatcccggccgtgcactgcccggaatgcggtctcgtgcccgtgccggaggaggaccttccggtgcgcctgcccgaggacatcgacctggctgcaggcgagacgcttgccacgcacgaggcgttcgtgaacacgacgtgcccggtatgcggcggcccggcgaagcgcgagacggacacgatggacacgttcacatgctccagctggtactacctgcgctacaccgatccgcacaacgaggagctgccgttcgcgcccgagaaggcgaaccgttggatgcccgtcgaccagtacatcggcggcatcgagcatgccatcctgcacctgctgtacagccgcttctacacgaaagtgctgcgcgacctggggctgcttgagttcgatgagccgttctcgaacctcttgtgccagggcatggtgaaggacgagcacggcgagaccatgtcgaagtcgaagggcaacgtcattgcccccgaggacatgatcgccgagtacggcgccgacgcggtgcgcgcgtacatcctgttcatggccccgcccgacaaggacctgctgtgggacgagggcggcctggcgggcatctacaagttcatgaaccgcgcttggcgcattgtgaacgacctgatgggagccgccgacgaggaaacgctgttccagccgggcgcgtccgaggacgagggcatcaaagcgctcgaacagctgctgcgcgagcgccatcgtgtggtgggcaaggtggtcgacgacttcgaccgcaacaacttcaacacggccctcgccgccatcatggagctgacgaacgcggcgagcgactacctgcgcaagcgctcgcccgagcagcgcgccgcctgcgaagagtcgcgcgcggtcgatgccgaggtggccgaggtgctggtgaagctgctggctccgttcgcgccgcactgggccgaggagctgtggcatgcggtgctgggcaaggacggctcggtgcacacgcagccgtggcccgagttcgaccccgagcaggccaaggccgacgaggtcgagctggctgtgcaggtgaacggcaaggtgaaagcgaagatcatggtagcggcggacgctgccgaggacgacatcaaggccgtaggcctcgccgccgtcgaagcggcgctcgagggcaaggacgttaagaaggtcgtcgtggtgcccggccgcctggtgaacatcgtcgcgaagtagggcgcacgataaggctgggacattgaggaacggctggggtttccgagccgttccgttttggagggggctatcgagagtggcgaggaactatgccacgtaatcggcggcgttgtcgccggctatgcgaccgaatgtgtatatgtctgccatggaggtcgaccccaaacgattcgtgcccatcttatgaccggctacttcgccagccgcatacaatcctggaataggggatccttggacgtcgagcacctcagcgcttgtgttgatgcgtaggccacccatggtgtaatgaacggcgggcttgtaggccatgatgtaatacggcggggtgtccaccttgtgcatggttccgcgataggcgaagtcgggatcagatcctgcgtcgacgtatccgttccactgctcgatggttttcgaaagctgggctgcatcgatgccgaaaggctcgcatgcctcctcgagcgtatcggccttcacgcatagcttgcgcgatgcgaggttctcgaactcgtctgaatgtatatctaccaccttggtctcgtcggcagcggcttgatcccatatttcgtaagcgcgctcgtcggtttgctcgaggatggctttcgatagcacgtcgcgacgtccaagctcctcgacgaagcgtttgccttccttgttgaacatgaccgtgcgctcatcgagacgcatgtcgtccaggtagagcagcgcgccggtatcgacgtcgcagatgggataggtttgaataagctccatgtcgaccagatcggctccgatggccgaagccatggtcaggccgtccccctgtgcgcccactgaatcggtcgagttgaactgctcgccgaactcggggttggccttcgcgcgcatttcgacgttcgcgccgaacccgccgcatgacaagacgacggccttgcagtcgaaagcgtactcatcgcccgtgacgacgttcactgcctttatcccgttgatctttccatcggaatcttgtgcgagatcggtggctttcgtgttgtcgatgagcgtgatgttgtcgatggatcgcgcacgcgtggtcagtcgcgttgtcatggcgttgccgatgtgccccgagggaataatggagcgtttgacggtgtggccgccgaaaaacagcaggttgtgctcccaggaaacgccgccctcgtacgtgagccattgcgcggcatcgtacacgccgcgggcgatgacgttgaccagctcgggatcgccgcgatggtctcctccttccagcatgtcggccgcgagcagttcgggactgtcttcaagccctgagttcttctggatccagttgcccggtacagccatttctccgcccgacaacgcggtcgatccgccgaacacgccgagcttctccatgagcagcaccttcttgcctttgttcgctgcactgatggccgcagtgaatcctgccccgcccgcgcctacgatcactacatcgtacgacgtgggaatgtcgttatcgggccgttgaagtgccttgtcgcgcttcttccattccgatgatttctctccggctttgtcgagcgcttcggcaacggctgtgaggtaggccatgctggaaagcgatgcgccgctcacgacgtcgacgttcaacgtctgaccttcgacgatgagtttgccgagcttgtccatgcagacatcgcccaatccggcagactcgcgagaatcgagcacgtcgatgcgctcgatggcgccgtttttcgtgatcacttccacctgtatggagccgtgcttgcccatgccgctgccgacggttgccacgcttgcttcgtcggaaggtgctttcgcggcgcttcccttcggcgcgcatccgccaagggtaagggctcctcctgcggtcgcaagagcggctccggtgagaaactgcctgcgtgaaagttcagccatgatgtccatcctccctgttatctgttccgtctccccggttggtcggcatcgcaaccgtgttgagcgtcgagtaccgacctgtgtgctcgggacagcggaaacataccatcgggaaaatgcctttgcagcccgcggcgggtttcaatgtgtaaccctacccgagtttaaaaatgtaaccccgtgcaaaacgccttcgatatcgcggggcgaaagcgtaagatggaagctggaattgcagggaggggaggaactgcatgagggagttcgtcgcgcgttggaaagacatgtttatacgcatgggggctatgccggtctcttttctcggggtggggttgtaccgtgcatggcttgccacgttctttcgctatgaggcgtttccgaccattgatttcttcgattacgcgctgttcgagggagccataggcgtggcgtcgtttgccgtcgtgctcctatcccgacgtatcacgcctctgtggtcgaacaacgcgctggtgacgttgaccgccatcggcatggtcggaggctctgcgctctgcgtggtctcgtgcttctggctgcaagttgccgcgctcaaatacgccggcctcatgttggcgggagcggggctgggattgctcatcctcatgtggaccgaattcttcggatcgctgaatcctatgcgcgtagcggtgtactatgctggcgccatcgtgttgggggaagcgttgaaatggctgttcggcgggttggatcctgcgtatattgccgtgttttccgtgatgcttccgcttgcgtccatcgattgggttcggcgatcgatgaagcgtctgccggatgtcgatctgcccaaacgcatgggaaaggccgggctctcggaggtgccttggaagcccattctccttatgggagtgtgtaccttcgcgacagggttcggcgtgttgccggatcagccgctggtggtcggaaacgtcgtcgggactgtgttggtggcggcgtttgtgatcttcggcgtattgtcgtcgtcaagatggttcaacttcgacacgatataccagctcgccttcccctttatgacggtggggttgttgctgatcgccccgcagttctctctcgatgcgcaaacggttgcgacctgctacgacgcgggttacacgatgctttccatcttcatcatgatcgtcttgagcaacatcacgtaccgtttcggcatttctgccgcctggttgaacggaatcgagcgtggcatccgctatctggtggaagctggaggatggagcttgttcgcatttggctcgtcgtacttgccgggggaattcatgaacatgcttcatatcgggatcgttgcatctgtggtggtggcgttcgtaatcctgtttttcaccgaaaaaaggctttccgcgaagtggggcatcaatctcaagggggatcctggagaggacgacgtgttttcgccggggctgttggccatgcgcgtatccgatctttcgcgcgaatgcagtctcagcccgcgtgaagaagaggttctccaactgcttgcgcggaaggggacgacggcggagatcgaggagaacctgtttgtggcgcgcggtacggtaaaagcccatacgagtcgaatctatcgtaaactgggagtgcacagccgcgaggagctgtacgaattgctcggcatcgccgagtagcgctgcgatgcggtttgaaggaggcgcgatggcgaaggaaactttgttcgaggagatggaaataggctcgttgcgggcgaaaaaccgactggtgcgagcagccacctacgaggcgttagccgatgacggtgggcatatgactcctgagctgacggcgatctacgaggagcttgccgatggcgggataggtacgatcatcgtggggtatgcacgcgttatgcgaaacgaacagccgaatcctcggatgctgggcatctacgacgactcgttcgttcccgaattccgggcattgacggacatggctcacgcgcatgggacggctatcgtatcgcagatcgtatacggcggctcggcgacgaagctccagccgcccagcaggcgcatcctcgggccgtcggccgtcgccaacccgaagaccggcatcgtgccggtggaggccacggttgccgatctgcatgagctcgcccaagcattcgccgacgcggcggcccgtgctcaaactgccggattcgatggcgtcgagctgcatgcggcgcacggctacctgctcagccagttcttgagccccttgctcaacaggcgccgcgacgagtacggcggtgccctgcggaaccgtgcccgcttccttgtcgaggtcgtcgacgctgtgcgcttgcgagtgggcgcgacgttcccactgatcgtaaagctgaacagctccgacggcgtggagggcggcctgactgaggacgacagcattgaagcggcgaagctgctggcggctcacggcgcgtcggctatagaagtgagcgggaactggcggaactgccgtgtgcgcgacttcgatggagagccgttcttcgctccctatgcgaagcggcttgcgtgcgaggtcgacattcccctgatccttaccggaggcaatcggcggctcgatgcgatggagcgccttgttgttgaaagcgccggcggcatagcgggtttcggtctttgtcggccgcttatctgcgaaccgcgactggcgcgacgctggcgggtcgatccgcaggcgaagccccgctgcgtttcgtgcgataagtgcagcacgatgccgggccatcgctgcatcttggaatgagacaagggaacggggtttacgactcatagcccgcgacgagtcgtaaacctcgttcccttgtctcccttgtctcctcgaacccgcgcaattctcatgtaatcggcttcaagtttcgatgacgggcgcggaatgcgtagcgggttcggtgcgggatttgctatcatcgacgcttatgacgcgacgcaagaaacatggatggttgaagacgatgctgggtttgatgctcggatgcatgctcgtggtcgtcgccgtgttcgcggcgacgaacgtggcgaccatcgccacgaccaaagatcgtatcgtcgagccgcaatcggcggtcggcttcgatgccgacgcgatcgttgtgctgggcgcatccgtgttcgccgacggcacgccgtcgggcatcttgcgggatcggctggacgacggcatcgcgctctacaaggaaggtgtggcgccgaagctcatcatgagcggtgacaacagcacggtgtcgtacaacgaggtgcaggtgatgaaggactacgccatttcccaaggcgtgccgagccacgacatcttctgcgaccatgcaggcttctccacgtacgagagcatgtatcgtgcgaagcacgtgttcggcgccgagcgcatcgtggtggccacccagacctatcatctgtatcgtgcgctgtacgccgcgcagggtcttggcctcgagtccctcggcgtggccagcgactaccatgactactccaagcagctccagtacgatctgcgcgagatccccgcgcgcacgaaggacttcttcaagacgctgttcaaggtaccttcgacgttcgtgggcgaccccatcagcctcgatcagtccggcgacgtcaccgagggctgacggggagtgtcagaggtgcgtcaggggcgcgcgattctcacgctagcagcgccaacagcgcctgcgcttcgcaggtcaccgggtcgaggacggggatgccgacggctcgttcgagctgcggcgccaagccgatagtcgaaaaccccgtgcaggcgagcgcgatgaccgctgcgccttcttcgcgcaggcgtcgagccgccgtgacagcggcgtgttgacctgcgggcgtgttcagatcgcgcgtgtcgcgaacgccgtcgggtacgaggttcgccaacagacgctcgcctaagatgcgcgggaacgcgggcggcgcgtccggcgtgatgccgatgacgcctaccggcccctcgtgaagcgccgcggcggtggccatgctttcgcccgcgcccaccaccggcacgcccacgatggcgcgcgcttcggctacgccggggtcgtcggcgcagctcactatgatgccgtccgcttcctgttcgaccagctgacaggcaagcgcaatcactttaggttcggcagtgcgcttcgtagcggcatcgtgcacgccctcgggttgatcgggaatgcagcgcgacacgacgcgcacctgaggaaacgcacgctcgatgagcagcccatgcgcgtcagcctgttcttgatcctgcgtgatgacgcggatgactcctacagtccaggtggggtgaaaaacggtatccatggcgatcactcgtacttttcgataaggtcgatgagatcctgcttcgaatgcagggcggtcttttccaggatgcgccgcgtgtgcgtgcgcacggtgctctcggacacgaacagcgcctcggcgatcaccttggccgagcgcccgcgcgccaggtaggggagcacctcggcttcgcggcgggtcagcccgtagtacgaggctatctgctcgagcacgtcgccgtcgggctcggaggcggattcgtcgcctcgcgcttcgtcggcggaggcgatctgctggcgggggcaggcggctccgcatcccgctgcgcacgaaacggccgcggctttcccttcggcgtctttcgccttgctggcgccgaagctcaaaaacgagaaccgattgccgccctgctggaacagcgccagcatggccagcacgtagaccgcgcccaccgacacgccgatgaccagcatggatgggctttcggggatgagcatcaccacgtagccgatgccgatgcccaccagtcgtgcgatgatggacacccctcgcacgatgccgcctaccacgaagcccgacacgctgaagtcgtatgcggtcgacgccaccatataccagatgatcacgtcgaatacgccgtagcacgcgctcattaccgtgttgagctccaccgggtacgtactccagaacatcggcatgagcgcgaacagcaccacgagaatgggcacgatcaccttgaacgtaagcgccagatcggtgcggcgtcgcgcgaacagcacgagcccgatgagcgccacggcggccacgatgttggcgataagcggcagccggtgagcctcgtaagccgagtcgactgaagccacggtcatctgccacacgtagccgaacaggcacgacagcacgaggctggccacgatgagactgaccagcgagccgagcgccgtgcggtaacgccccgagtcggccgtgattgcgggccgatcgtcggtttcttcgcggttgcagcgcgtcaagcacagctgcgagagcacgggcagcggcaacatgagcagcagcgccggaacccccagctcctccgagcagaacgagaacgcgacgaacaacagcgcggtcaacaacagcacaacgggcagatagaacgaagtgcgcgacggatgcatgcgcccgaggcactcggcccagcttccccagaagtagccgtatcccacgccggctagaacggagcccagcacgagcgggacgacggccatcgtctccgtcagcaatccggcgcttccggccatgcccgagcctgtcatcagcacgagccctgtcacgatgctcaccgtgaacgccgaagcgggcagtttgtcgtagaaggagtggtcgcgttccgtgcgcgaggccaccaggaacagcgtggtcatgttcgcgacgaacgagatgatcacgacgagcgtctgatatcccgtggtgttcaccggccccgacagcaggatggagctgcggaacgtgagcatgctgcatgcccagaagaaagcgaggccgaggtggcgtatacgaagcgttttccacaccatgcgcatgctgcgtcgatcgcgcgggcgcgataggcgttcaggcatgaacaatccctcctcgtccttggcgccgcctgtttctctgagaacggcgcatggctccctttcatcttggaaaagcttatcatcagcgcaaacaatcaaatcatcaataattgatgatactgtcccgagaccctcatcatagcattgcccacgccgaaggaagggggctgcgatgatcgacgggcaaaatgataccatagtaataggattacaggcgtgcgctccggttttcgcgaccggctcgattgacgacgcagcggaggccggcgaagagggctcgtgctgcaacgggttccaagtcgattggctgtccgaagacgttcgccgcttgctcgctgctcacggctttaccgcccccgatccagtggatagcgtcgcgcgccgcatggtggagcgcgaggtgctcacgccgggcatgccgcttgcggccatgccggtggaatcgctctacaagccgtggacgtctttgccgggctcgcagttcggcggagcgcgagggctgtacttgggcgatgcggcgcgccatgtgcaggcgctctacgaagcgcttaaggtggagattccgaagcgtttcgcggcgatgcccgaccacctgtctcttctgtgcgagctgcttgcgctctacatggaagccggcaacaaggaggctgcccgcctgcttgcacaggatcacttcgactggctcgacgcctacgacgcggcgctcgacgagcgcgcggagcgggcggcctcggcttcggccttcgacgaggaggagcgcgccgctctggcgcgcggcatcggccaggtgcgcgcgtacgttgcgcttctgggcgagctcgcgcgacatgcggggcagggcgcaccgacgccgaacgaggcgaaaacggcaccaacaagggaggaaagaaaggaagcgaaatgaactcatccgtaacacggcggacgttcctcaaggggtcggcggccacggcggcgctggctgcgacgggcgcgggcgtgtgctctctcggcgcatggcaggccgaggtggctcacgccgaaggctcgtacgagcgcaaagaaggcgcatcgctctgcaacggctgctccagcaagtgcggcctcgtggccaccacgctgggcggccagctgttcacgctgcgcggcagcgacgtgcatccctacgccaagggcaccatctgcggtcgaggtcacggcgtggcgcagatcgcctattccgacgagcgcctgacccagcccatgcgccgcgcggccgacggttcgttcgaagctatcgactgggacaccgcgttttccgaaatcggcgccaaggtgaaggacattctggccaagaacggccccgaagccctggcaatcgtccaggatccgcgcccttcgggcaaggagtactccaagcgcttcatcaacgcgctcggttcggccaacatctacacgcacggcgcggcctgcaactcctcgaaggaggcgggcttcgcgcagaccatcggcacgggcaacttctcggtcgatttcggcaactccaagatggtcgtgttcatcggtcgcagctacggcgacggcattcgcccctcgtcggtgcagagcctggccgccgcggccgacaagggcacgcgcatcgtcatcgtggatccgcgcctcaacaactcgggcatcttcgccaccgactgggtgtccatcaagcccggaaccgacctggcgtttctgctgggtatctgcaacgtgctcatcgaagaggacctgtacgaccatgagttcgtcgagcagaacgccgtgggcttcgacgagttcgccgcgcaggccaaggagtacacccccgcgtgggccgagcagcagtgcggcgtgccggcggccaccatcgaggagatcgcccgggcgcttgccaaggccgctccggccgcggccgtcgaggcttcgtggcgcgcggcgttcggatgcgcgcatcagaactcgttcgacaccgcccgcgcggtgacggcggtgaacgcgcttctgggcagctggggcgcgaagggaggcgcgctgctcacgtcctcgccgaaggcgggcgacatcgacaagcagaagttcccctccgctccgaagcccgaggccaagcgcgtgggcgacaaggagtacccgctcgctcccagcggcatgggatcgaacctggccgtgctgcaggcggcgctcgacggcgctatgaagggcgtgttcttctacaactccaacgccgtgcagggctacgcccagccgaaggtgtggcgcgaggggttggagaagaccgatctcgtggtcaccatcgacgtgcagatgtccgagacggcgctcgcgtccgactacgtgctgcccgagtgcacctacctcgagcgcatggagctgcccgagttcatcggcggcaagaagcactacgtggccatgcgcacgcaggtgctcgagcccatccaccccgagacgaagccgtgcgacgagatcttcgccggcctggccgaggcgtgcggcgtgggcgagtactttccgttcacggtggaggagcttgcggctgcccagcttgagacggtgggcgtgagcctggacgagctcaaggagaagggcatcgtggagctttccgatcccggtttcgagtacaaaacccccaagttcaagaccccgactgagaagttccagttctcgtccgaggcggtgggcgaggcgggcctcaacccggtcatcggctggacgccgcgcctcgtggagcccaaacagggcgagttctacctggtgggcggcaagcagggcatccactcgcacacgatgacccagaacgtggccacgatgaacgccatctcgcgcgagtacggcttggagcgcgcgtggatctcggcgcaggatgcggccgacctgggcatcgccgacggcgatatgatcgagatcgcctcgagcgagcataccggccaggtggcggcgcgcgtgacgcagcgcatgcgcccgggcgtggtgttcctgcccacgcactacggcggatcgtcgccgtaccagagccgcgcgtaccagttcggcttgaacatgaccgatttcgtgccgttccacatggagcccggcacgggtgccaccatgagccaggaagtggccgtcacggtgaggaaggtggaggcgtaacatgacccgctacggaatgctcatcaacaccaagaaatgcgtgggctgctacgcctgccgcatggcgtgccagatgatcaacaagctggaacccgaagaggcgttcatcagctacaaggagatcgagcagggaacgtatcccagcgtgtacgccgagaccgtgcccgtgcagtgcatgcactgcgagaacgccccctgccagcaggtgtgcccgacgcacgccacctacaccaccgaatccggcgtggtgctggtagacgaggagaagtgcatcggctgcaagtactgcatggcggcgtgcccctacggcgtgcgcatccagatcgagaagaccggcgtcatcgagaagtgccgcttctgctggtacgagggcgagccgggcaacccgccggcgtgcgtgggcacctgcatctcgggcgtgcgcgtgttcggcgacctcgacgatcccgacagcgacatctcgcgcgagatcgcccgcacgaacgcccagcctatcgcgggcgacctgaccgaatccaagatctattacgtgaggtgatgaaccatggtttggggacctatgatcgcatggtacctgtttctggccggcgcgtcggcaggtgccttcctgacctcggctttcgttgaggtgaaatatcccgagagcgtgaagatgcgcgtggccggccgtatcatcgccccaattttcctggggatcggcctggtcatgttgatgctggacgccgaagccggcctgcacaacccgctgcgcttcttctggctcatcgctaaccccggttccgtgatgacgctgggcgtgtacttcatctgcgtgttcatgccggtggcgctggtttccgcgctgctggaggtgctgaagaagcgcgtgccgaagtggctcacgtggatcggcatcgtgttcgcgttcgccgtggcggcctacaccggcttcctgctgggcgtggtgaaggcgttcccgctgtggaacaacgcggtgctgcccatcctgttcgtggtatcggcgctgtcggccggccttgcggccacgtcgctggttggcctgctggtggatcgcgagcgcttcgagcagatgtggctgatcaagaagtcgcatgtcatcctgtcggccatcgagatggtggtgctggccacgatgctggtcatcgtgagcgccggcagcgtcgaaggtgcggcgtcggtgtactcgctcgtggccggtcagtacgctccggcgttctggggaggcatcgtgcttctgggcctggtggctccgttcatcatcgaaggctacccggtgttcatcacgaagcgcgtcgagacctcgatgacttcgatggtggtcagcgtcatcggcgaggcgggcgtgctggtgggcggcttcatgctgcgcctgctggtggttctgtcggcgctgccggtgctgtacctgtaagctttgcctattccgacaggcgccgcaaccccctctgcggcgccttgcatgaagcgggccctcgcacgatgcgagggcccgtcgtgcgtgaagggcttggcatgcggcgcagggaggcctcttccgcagagcgcccggcggcgcccttggtccgccggggctcgggaggactcgcatatcggcgcgatctcgccggatccttgcgccggccatgcggaggaaagctcggttggcagagatcgcgcactatgcacgattccaaggcgattcttgtcggggcttgcgatgaaaaccccaggtcgctgattattccgaacaatagaatcgtgcatagcgtgcgatctctgccaacactcgcggattcttgcgcgggtgcagcaaaggcgtgacaaagggacgggtgattcgagacactgtacagtgtctcgaatcacccgtccctttgtcacgcggctatcggtatttctcgatgaggtcgatcacctgttgtttggagtgcaggtcggttttctccagaatgcggcgggtgtgggtgcggatggtgttctcggacacgaacagggcatcggcgatgacgcgcgccgaacggccgcgcgcgatgaaaggcagcagctcggcctcgcgccgcgtcaggctgaagtcctcggcgatctgctcgaacacggcttcttcgctgaggggcgcgtcgtccggccgggtttcgggagctgcaggggcaatggaggctgcgggagcttcagccgcctgcacgacgggggcgatgacggcggccggcgcgttcgccggctctgcgggcggtgcgttcgtcgcaggtgcggccgccttcttttcgatcggctcgtcctccaccacgatcggcatgcccttgcgacgcgtacggtagaacagtcccagcatggcaagcacgtacactgcgcccaccgatataccaacgatcagcaacgacgggcttcccggcacgagcatgagcagatagccgatgccgattcccagcaggcgcgccaggattgacaatccgcgcaccagggcgccgatgacgaagcccgaaacggcgaagtcgtaggaggccgacaccaccatgtaccagatgatcacgtcgaacgtcccgtagcatgcgctcatcacggcgttgagcaccacggggctcgtctcccagaagaacggaagcacggcgaacaggatgacgatgacgggcacgatgacacggtatgccaaggccaggtcaagacgcttgtgggcgtatagcacaagtccgatcaggcatacggccaccacgaggttcgcaacgagcggcgcctggtgcgcctcgttcaccgatcccaccgacaacaccgtcatctcccatacgagcccgaacagcagcgatagcacgaggctggccacgatgagcgtgaccagcgaggcgagcgccgtcaggtagcgtttcgaatccacggtgcgcgcgtagcgcccgtcgggaacctctgcatggcaccggcgcaggcagacgagcgacagcacgggaagcggcagcatcaacagcagcggcggggcgctttcgtattcggccgagagcgagatgatcaggaacagcgcagctgtcagcaaaaacgccatcggcacgtagaacgacgtgcgcgaggggtgcatgcgcccgaggtactccgcccagcttccccagtaatagccgtaacccacgcccgtcagcaccgatcctcccaccagcagcgccatcatcgtcgcgtcgtttcccaggcgtccggcgacgtcgatgaccacgaggccggccatgatgagcgcgcagaacagccatccgggaaggcggtcgaacgtatgcggatcgcgttccatgaacgcggcgatggcgaacaaggtggtcatgttcgcgatgaacgagaccagcacgacgagcgtctcgagctcgggtgtgttcgcgggcccctgcagcaggatggaactgcggaacgtgagcatgctgcacgcccagaagaaggcgaggccgacgtgacggaatcgcaacgtcttccaaaccatccgcatgctgcggcggtcgcgcgcgaccgcgatccgagtgctcacattcctccctttcccggtcgacgagcgggtagccgttccgtgtcgaagccgcttaacaaccgtgctgatgaccctattcatcaggtaaaacgttcaaatcaccagaaactgattacccgacccgttcccgtcgcgcctaggattggcgatgacgagaaaggacggatcgtgtccgttatgacgaacgtagcctacatattatcgctcattgcaccgcttttttcctacctgaaagaagaggattacgtctccatgcagcaaaaccttgcatggcaggacgtgcgtgcggcggcaggcgctccgctgcaagaggcactgtcgcttccgacatggcccgctcgctcgtcgtttcagaatgaactgctggtgccaggcatgccgctggccgctatgccggtggagtcgctgtacaaggcgtggtccacgcagcagggcaacgcgttcggcgctacgcgcgggctgtacttaggcgatcctgcgcggcatttgtcccaggtgtatcgagagctggccatcgaagtccccgcggagttcgcctcgatgccggaccatctgacgctggagctggagctgctggcgctgctgctggacgcgggcaacggagaagccgcccgccagctggctgccgaccatctcgattggctttgcgagtacgacgctgcgttggccgaccgcgccgacatggtggcgcataacgaagcgctcccgtcggtgcgccgccggaacctgctggacggcatcgcgtttttgcgggctctcgcggcgctcgcgcagcggacggtgggcgaagcgctcgccttcgcgaacgccgccgaaggagaggccgtcgccgtatgacctacccggcgtctgctgctgcaagcaggcgccgtgcccataggtgaacaagcaagacgagtgaacgataagaaagggaggaaaggaatgagggagacaacggtatcgcgtagaacgtttctcaagggttcggccgctacggctgcgctcgcctgcgccgcgggttccatctcgcttggctcatggcaggccgagcgcgcggcagcggccgaaccggcggtcacggtcacggccccgtcgctgtgcaacggttgttccagcaagtgcgggcttatcgccacgacggtggacggccagctctggacgctcaagggcaacgaggtccatccgtactcgaagggacgcatctgcgggcgcggccatggtcttgcccagatggcgtactccgacgagcgcgtcacgcagcctttgcgtcgcaaggacgacggcaccttcgagcccatcgactgggacaccgcgttcaaggagatcggcgcgaaggtgcaggacatcatcgccaagaacgggcctgaatcgctggctatcatccaggatccgcgtccgtcgggcaagcagtactccgcccgcttcatgaacgcgctgggttcggcgaacgtgtacgcgcactcttcttcgtgcaacctgtcgaaggagagcgcctaccagctgaccatcggcgccaccggctattcgaacgacttcgccaatgcgaagatggtcatgttcatcggccgcagctacggcgacggcatccgtccctcgtcggtgcagagcctggccgacgccgccgagcacggcacccgcgtggtcatcgtcgacccgcgcctcaacaactccggcatcttcgccagcgactgggtgcccatcaaccccggcaccgacctggcgctgctcatggcaatggcgaacgtgctcatcgaggaagacctctacgaccacgatttcgtggagcagaacacgtacggcttcgaggagttcgccgagcaagccaaggagtacacgcccgagtgggccgagaagatcaccgacgtcccggccgagaccatccaggagcttgcccgctccatggcgaaagcggctccggcggcttccatcgagtcgggttggcgctcggtcatcggctgttcgtacaagaactcgttcgagacggcgcgtgccatcacggccatcaactcgcttctgggctgctggggcgcgaagggcggcgcgctgatcacgtcctcgccgaaggccggcgctatcgaggacgcccgcttcaaggcgcccgcgaagcccgctgccaagcgcatcggcgatgcggagtacccgctggtcctggccagcgccggcaccaacgtggctgcgttgcaggcgacgctcgagggtgagatcaagggcctgttcttctacaactcgaacgcggcgaagggctacgcgcagccgaagaagtggaccgaggctctggaaaagaccgacctcgtggtcaccatcgacgtgcagatgtccgagacggctcagcagtccgactacgtgctgcccgaggtcacgtacctggagcgcctggagcttccggagttcgtgggaggtaagaagcactacgtcggcatgcgaacagtggccttggagaagatccatcccgaaacgaggacgtgcgacgagatcttcaacggcctggcggaagcgtgcggcgtgggcgagtatttccagttcaccgccgaggattgggctgaggcgcagctggcaaccgtgggcgtgtcgcttgaccagatgaagaaggaaggcgtggtggagctgcctgacccgcacttcgagtacggcgtgcccacgttcaaaacggcgtcgggcaagttcgagttcaaaaccgacaaggtgggcgaggccggcctcaatccggtgatcggctggattccgcgcaaggtgacgccccagagcggcgagttcgccatcgtgggcggcaagcagggcatccactcccataccatgacccagaacatcgaagccctgcacgccatctcgcgcgaataccacatggagcgcctctggatggccgccaaagacgctgccgacctgggcgtgcagacaggcgacaccgtggaggtgtcgtcgagcgagcacaccggccaggtggaagtgcgtgtgacgcagcgcctcaagcccggcgtcgtgttccttcccacgcactacggcggcgacgcgcctgcacaaacccgcgcataccattacggcatcagcctgaccgacttcatcccgctggacgcggagccgggcgtcggctccatgatgagccaggaagttgcagtcacggtgaagaaggtggaggcgtaacatgacccgctacggaatgctgatcaacacgaagaagtgcgtcggctgctcggcctgccgcattgcttgtcagatgaagaaccatctggatcccgaagaatcgttcatcaagtaccacgagatcgagacgggggagtaccccaacgtgtacaacgagatcgtccccacacagtgcatgcactgcgaggacgcgccttgcgctgccgtgtgtccgacgcatgccacctacatcaccgattccggcgtggtgctggtggacgaggaaaagtgcatcggctgcaagtactgcatggctgcgtgtccttacggcgcccgcatcgtgcaggagaagaccggtgtggtggagaagtgccgcttctgctgggacggcgaaaaaccgggcaatccgccggcgtgcgtgggaacctgcatttcgggtgcgcgcatcttcggcgatctggacgacccggatagcgagatcaaccaggctatcgcgaaataccacgcacagccgctcgctgacaacctgaccgtttcgaaaatctactacgtgaggtgatgaaccatggtttggggacctatgatcgcatggtacctgtttttggccggcgcgtcggcgggagcgttcctgacgtccacgttcgtcgaagccaagtaccccgagagcgtgaagatgcgcgtcgctggccgcatcatcgctcccatcttcgtcggcatcggcctgctcatgctcatgttggacgccgaagccggtctgcacaacccgctgcgcttcttctggctcatctcgaaccccggttccgtgatgacgctgggcgtgtacttcatctgcgtgtacatgccggtggcgcttgccgtggccgttctcgagatactcaagaagcgcgtgccgaagtggctcacgtggataggcatcgtcgcggcgttcgccgtggcggcctacaccggcttcctgctgggcgtggtcaaggcgtacccgctgtggaacaacgccatattgcccatcctgttcgtggtgtcggcgctgtcggcgggcctcgctgccacgtcgctcgtggggctgatcgtggatcgcgagcgcttcgagcagatgtggctgatcaagaagagccacgtcatcctgtccgccgttgaaatggtcgtgctggccacgatgctgatcatcgtgagcgccggcagcttcgaaggcgccgcgtcggtctactcgctcgtggccgggcagtacgctccggcgttctggggcggcatcgtccttctgggtcttgtcgcgccgttccttatcgagggctacccggtgttcatcgccaagcgcgtggaaacgtcgacgacctcgatggtggtcagcgtcatcggcgaggccggcgtgctggtgggcggcttcatgctgcgcctgctggtgattttggccgccctgcccgtgctgttcctctagctcacccgtgcgccccgcccaccccctggcggggcgctggcggccggattccccctccctttctcttccggccgcttttcctctttcatgggcgctgcgcactccccctccgcgcagcgcccgtctgtattccgacgaatcgaggtggcatctatggaagaatcccacgttccgcattggggcatggtcatcgatcttgcgaagtgcgtcgggtgcgattcgtgcaccgtggcgtgcaaggccgagaaccgcacgcctccgggcgtcacgtacaacgtggtgctggaacaggagacgggcgcgtatcccaacgtgcgtatcgaggcgatcccccgtccctgcatgcagtgcgagaaccccgcctgcgtgtcggtatgcccggtgagcgcgacgtaccgcggcgatgacggcatcgtggtcatcgacgccgaccgttgcataggctgcaaatactgcatcgccgcgtgcccgtacggcgcgcgctcggccgacgagggttcgtcgtacgcagtcgagatgcaggcggccgatcaggtgacggcgcccgagtacggcgtggaccacggcgcgcgcgggaagtaccggggcacgtacggcaccgtgcgcaagtgcacgttctgcgcgcaccgcatcgccgagggcgaggcgcccgcgtgctgcgagacgtgcatcggcgacgcgcgctacttcggcgatctgaacgatccgtcgtcgaaggtggcgcagctggccgcttcgccgcgggcgttccgcctgcgcgaggagctgggcacgaacccgtccgtctactatctgaaatgagcgaggtgagcatctatggcatctgaaacgaagcgcaggcgctggctgccggcaccgttctcgcgccgtgctaccatcgtgtgggcggtgatcgtagccgtgctgctggttgcgggcgcgtacttcatgtacgaccgcttggcgaacggactgggcatggcgggagccacgaattccgtgccctggggcttgtgggtggtcgtctacatctggttctccggtttggcgggcggcttgtacctcctttcggcgctggtctacctgctgaggattccccgcttcgcgcccgtcgcgcgcatggcgcttggtttgagcgtggtgtcgcttgtcgtgtcgatgatattcatcggcatcgacctgggcgccatccggcattcgctgggaacgctgctgttcttccattggtcgtcgccgttggcctgggagatcaaggcgtatatgttcttcatggtcgtggccgtcgcacagttcgtgctcgtgctgctgaacgacaagcgagctgccgaggctgctggcgagcccagcatggaatcgcttcggcggcgcggcaacgtgaacctggccatccgcgtgctggccggggtgggcgtggccacgtcgttcgtgggccctccgggcggtacgggcatgttcttcgctgcggtgaagacgcgcgggctgtgggagggcggcatcacgtcggtgctgttctacgtcatggccgtggtgacggctgccgcgttcctgatcgtcgcatatcggctgctcgcgcggctgcgcggggcgcggccggacggtagcgcgctcgtgggtctgaaccgcgtgctggcggcgtcgctgttcgcgctggcgttctgcgtgttcttccagatcgccccgccgttgctgtcgggcgatccggcgtcggcgacggccgtgggcgtgatggtgtcgggttctttggcgccgctgttctggatcggcgagatcggcctgggactggcggtgcccgcggcgctgttggccgtgggggcgtttcgttcgcgctgcgcggccggcggcgcttggacggtcgctgctgccgtctccgccatggcgggcatcctggcgctgcgctacgtgctggtggtggcagggttctcggttccgcttctgggcggcatgcccctgcctgcgtacgtgcccactttgggcgaggcgatggtgacgctgttcgttctgggattggccgtcggctgctacggactggctgtgcgcctgctgccgctcgaacgcaggagcgcgagcgagggcgaggcgcggttggaaagctcctacgagggcgcaggttcggccgccgtgtcgtgcggcggggtttcgacgggcaaggaggtgcgcgatggaagcgcagcataaagacggacggcgatgcgatgccgcaagcgagcctcagcgttcgagcttgttcggaacgccttcgcggcgcgccgtggtcggcgccggttgcgcggtcgccgcaggcgccttggtcgccggaggcgggctgggcgcgtacatggccgctgatgacccgctgaccgacgagcctcacgggcgcgacgacgccaccggcgcgtacgcggccgacgacgtcatcctgtccatgtgcaacaactgcaacagctactgcaccatcaaggtgcgcgtgaccgatgcggccgacggcaagcaggcgaacgacggcgccaccgcgctggtgcgcaagatcgcgggcaatccgtactcgccgctcaactcgcagccctacgcgccgatcccctacgctacgcggcccgaggaagcgctcgcccccggcgacgacatggccgtggccggtcgcgcttcgaacgggggcatgatctgcctcaagggccaggcgggcattcagctcgtgcacgaccggttccgcatcacgcagcctttgcgccgcgtgggggagcgcgggtcggacgagtgggagacggtcagctgggacacggccctcgacgagatcgtgaacgggtcgcccgcgctgggcacgccgggcatcgccgaatggtacgcctacgcgccgaagaagcaggtggaggccgatgtcgcgcttgtggagtcgggcgagatgaccaaggacgccttcgcggcgaaatgggccgacaagctgatcgacgtggagcatcccgacctcggccccaagtccaacctgttctgctcggccggcggcgaccgcatgttcctcgtcggagaccgcttgacgcagctggggttcggctcggtcaacaacttcaaccacggcggcgtgtgcggcatgacgggcgtcatggccaacgtgcgcacgcaccccacgacgaaccataagcgcatgtacgccgacatcgaccattgcgaatgccttatcatctggggcaccgagcccatgacggcgaacaagggtccgtcgtggctggctccgcgcctgtcggtggcgcgcgagcgcggcatgaagctgtacgtggtcgatccgcgccaagggcgcagcgcgtcgaaggccgacgtgtggctgcccgtgattcccggcaaggacgccgagctggcgttcgccatgatgtcgtggatcatcgcgaacgagcgctacgacgcggcctacctgtcggcgccctccaagaaggccgccgccgcactgggcgagcccacctggtccgatgcgacgcacctcgtggccgtcgacctgccgaaccggcctatcgtcacggccaaggtgctggggcgcgcgggcgaggccggcgcgaacggcgaggcgctggccgacgacgcgcgcttcgtgctggtggacggcgagttgactctcgccgatgccgctgagggcgccgccgatctgctggtggacgcagagatcgacatcaagggaaagcctgcgcgcgtgaagagcgtgttccagcttttgaaagagcgcgtcgaggagcgaacgctggaggagtacgccgccgatgcgggtatcgagccctccgtggtggaagaggtggcgcgcgagttcacgtcgcacggcaaacgtgcctgcgtcatgagctaccgcggcccggccatgcacgccaacggcttcgatgcggtgcgcgccgtggggtatctcaacttcctcatcggcaaccacgattggaagggcggtcacatcgccgccgcggcgaagttcgcgccgttcgagggccgctacgacttgaagaccgtgccggacgcgcatgccggatggggcattcccatcacgcgccagaagaccgagtacgagaagaccagctacttcaagcaggacggctatccggcgccgcgtccgtggtacccgctgccgggcaacctgtcgcacgagatcgtgcccaccttgcgcgcgggctacgtgtacgatcatttgggcgcgctgttcatccatcgccattcgctggtggactccacgcccggcgggcggcgactggccgacgtgctgggcgaccaggacaagatcaacctgctggtgtcgttcgacgtggagataggcgacacgtcgcgctttgccgacttcgtgttaccggacaaggtgtacctcgagcgcttcagccaggaatccatctatccgaaccagcagtaccagctcatccagctggggcagccggcggtgcgcgccttcgacggcccgcgctcggtggaggacgtgtacttcgacatcatgcaacgcctcgggctgccgggcgtcggcgagcatgccgtgccggtgggcaaggacggcgacggcggcacggcggccctttcgaccgagtacgactactggttgaagatggccgcgaacatcgcctacgccggcgagaagccggtgccggacgccgacgacgagctcgccctgttcgagcgcgcccgcaagcgcgcgctgggcgaggcgttcgatctggaggcgtggaaagccgccgtcaccgaggaggaatggccgaaggtggtgtacgtgctgaaccgcggcgggcggttcgcgtcggccgaccctgcgaagggcgacggttacgacggagatctgatcaagacgaagtacgctggcttgtgcgcgttctacgacccgaagacggcttcgctgaaagacgcgttgaccggtgagaacttcgacggattggcccatacggcgccgatcgccttcgccgacggcacgccgatggcgcggccggccgaccgaccgttcgcgttcatcaactggaaagcgcgcacgaacggcacgcaccgcaccatcgccgcgtcatggttgcgcgagacgaccaccgagaacttcgtatggatgtcgccgtccgacgctgccgagcgcggcttgaagaacggcgatgtcgtggaggtcgtggggcctgaaggcacgctttccggtcacgtgcgcgtgaccgagggcattcgtcccggcgtggtgggggccaactactcgttcggccagcagggctacgccgcgcgcgcggtcaccatcgacggcatgttgatgggtccggctcccgattaccttgaagaagagggcatcctcgacggcgacgagcccggcaagcagaagaccggtttcgccggcgggcgggggcgcggcttctgtatgaacgagctgctgcccgaggagacgcttgccggaggaggcggcgtgaccgatcctatcggaggcggcgccgcccagctcgacctctgggtggacgtgcggaaggcgtaggaattcggcgcactctagggcgcggggaaggccatgcggtccagcgatcttccccgcgccgattcgtgatgggtgcggcgtgcggtcggcgcggcgtgcgacgttcggttccccagaacctctgccgccgccgtggaggggatgcgctatgaggaagggcgcggctgccgcgcgctgggcgcgagctggtttgtgaatttcgcttggagcgggccactttctcgaagatacgggggttccggcttccgctatacttgcccgctgtgaaatcgcttctatacatattcgagcgctacaccagccttcgccagctttcgcggcgacgttcgcgcacggctgcgttccgcgcgccgggcgaagtgggccccggcgtgtggcaaggccatcgatgagcggactctcgtaagcggacggccttgttcgacggcctccgcgttttcgctttcctcattcatattccccgatcgatcgccggccgttctcttcgtgcgccttcctgcgcgcgagcgagggtatcggctcggtcgtcgacgcgtccgcaaaggaagtcgatgcgctcttgaacgaacaacaattggttgctgaacagcacaaagtaactcgcaaggaaatcaccgtcatcggcatcgtgctggcaggtgcgttccttgccatcctgaaccagaccgtcctgtcgcccgcgctgccgaagctgatggacgcgttctccatctcggccggcaccgcgcagtgggtgacgtccatctacatgctggtcaacggtatcatggtgcccatcaccgggttcctcatcgaccgcttctccacgcgcaagctcttcttcgtctcgctgatctcgttcatcgtgggcacggcgctgtgcgcgggggctcagacgttcgagctgctcatcgtaggccgcgtgctgcaggcggccggcgcgggcgtgcagctgccgctcgtgggcgtggttcccatgctcatcttcccgcccgagaagcgcggcacggccatgggcatggccggcatcgtgatgagctgcgcgccggcggccggtccggtgctggccgggggcatcatcgacgcgtggggctggcgcatgatgttctgggcgatgatcccgctggccatcctcgtgctggcggtgagcttcttcctgcttacgaacgtgggggagctcaagcgcccgcacctcgacgtgccgtccatcgtcctgtccacgttcgcgttcggcggcctgctgtacggtttctccagtgcaagcacgctgggctggggcaacgccgtggtcgtcgacagcatcgtcgtgggcgtggtcgcgctcgcgtggttcatccatcgccagctgcatatcgaggagccgctgctgcagctgcgggctctcaaaacgcccacgttcgcgtactcggccgtcatcgtgacggtggtcaactcggcgctggccgtgggcagcgtcatcctgcccatctacctgcagaacgtgctgggactgacagcgttcgaaaccggcatcctcatgacgcccggtgcggtggccaccatcttcctgagcccggtcagcggtatgctgttcgaccggttcgggccgcgcgtcatagccatcgtgggcttgacggggctcaccgcttcgctggcggcgctgtccttcgtcgacgacaagacgatggtcgcgtacctcgtagcgttctacgtcatccagtcctccggtctgacgctggcgaacatgccggtcaccacctggggcatcaacgcgctgccgaacgacatgatcgcgcacggcaacgccatcagcaacacggggcgccaggtgggcggcgcggtgagcaccgccctcatcgtgacggtgatgaccatggtgaccgcggcgaacgccgaagccggcccggtgctgtccacggcggcgggcatcgacgtggcgtacggcatctccgcggccgtggccggcatcgctctggtcatcgccgtcttgaaggtgcgcaacgtcaagaagcaagcggtcgcctcgcccgcatcccaggccgaagcgccgcttgagatcgaaatggaagaagctcgggaaggagctgcacgatgaatcggacgatcggcgacatcatggagcgggacgcgtacacgtgccgctacgaccaggacctcggcgaggtcgtggccctgttcaacgaactgggcacgagcgggctcgtggtgatcgacgaggatcgccatgtggtgggatttatcagcgacggcgacatcatgaaggcggtcgccgcgcagaagacgcgctccatcttcggcggcgggtactccaacatggtgctgtacgacaacgagtccttcgaggagaaggcccgcgcgctcaagcgccgcaacgtcatggagctggccgtgcagcgggtgctgtgcgccacggccgaccagaccatcggcgagatcgccgacgtgctggcgaagaagaagttcaagaaggtgccggtcatcgacgaggacggcaggctcatcggcatggtgcgccgcgccaccatcacccgctacctgttcgatgtgctgttcggcgaggaagagccgagcgccgagtagcgccggggcttatactggcagcatcaaccgcatcggtgcgcgtcgagaagggagaacgtcatgaaggtgatcgtcgtcggatgcctcgggcagatggggcagcccgtcagccgattcgtcgccgagcgcgagggtatggagctggtgggaggcgtgggccctgcgggacgcgactacatcggccgcgacctcggccaggtggtgggcctcggacgcgatctgggcatccccgtggcggacgacctctcgtccgtcatcgacgcgtgcgacgcgctcatcgacgtttccagcgtggagcagtgcctcgaaacgctcgacttggccgtggcgcatgggaaagctctcgtcacggccagcacggggttctcgcccgaacagttcgaacgattcgaagcggccggccggcacatcccgatcatcttcaaatgcaacacctcgaagatggtgaacgtgatgctgaagttggtggagatcgcggcgcgggcgctcgtggacgagacggatatcgagatcatcgaccagcacgaccgcgataagctggatgcgcccagcggcaccgccgtcatcatcggcaacatgatcgcggagctcaagggcaccacgctcgacgagctggccgagtacggccgcgagggccgcggcgcgtgcaagccgggcggcgtgggcttccattcgctgcgcgccggcgatatcacgagcgaccacaaggtgtacttcggaggcatgggcgagcgtttggagatcacccactactcctacggcgacgactgcttcgcccgcggcgccgtggactgcgccgcgtatctccaaggaaagcccgcgggcgtttacagcattaaagacgtgttcgacctgcgttagcgtaccgcccgccttctaggggcggcgggcttggcgggcggccgtcacgaagagggcgcaggcgatgagcgcgagcgccgccgcgggcgcaagcggcatcgtgccaccgaggaacagggcgatcgtgcaggcgaacagggcgccggccagcacggcggccaccgcccagcctctttggatacgggtcatggcggccctcctttcgtcgaagcatctacggtaccagcttgccttgcaggggtgggggcgacgcgctgacatcgaagtcacgatcgggcaacaccttctcaaacggggcggcgggtcagctgccctgcctgttcgcgctcctaggatgagggctgtttatatgacagctaggggattcatcgtgaatcctgaggaggtgaaatcgtatggatctcgcattgcttcaaatgccgatggttctgttcaccacgctcgtgccgatggcttcgggcgcgttcgtcggcctggcgctggcgtttctgacctcgcgtttcagcaaggagtgcctcgcccgcatcgaccgctggacgctgcttccgatggcgatcctcgccgtgggctacatcgcgtcgttcgtggcgctctcgtcgccgcagtattcgatgagcttgttccaaggcgtcgacatcgcgccgttgtccttcgtgggcatcgccggcatgctattcatcgcgctggccgtggtgtactggatcatcgcgatgacgggcaatctggacgagcgtccgcgcaaggtgttcgccaccgtagtgggcgcggcttcgctgctgctgtcgctcagcatcggggtgatgtacatgggctccgcggtgctcacctggaactctccgctcgtgccgctcggcatcatcgggttctgcatcgcaggcggcgtgccgctcggcgtgctggtcgtcgctctcgcgggtgggatgcccgaagcgcgcttgacgcggttgccaacggtagcgctgttcacggcctttatcggcgtggtggcggccatcgtcgccgtcagcgcgcagctgctgttcgcccagtccacgttcaacgcgttctttccgggctccgacgtgcttcccggttcgtgggtgtacctcgtgatatccatcgtggggttcgttgttatgctggcgactctgcgcgccacgctcatgcccggcggccgcaatgtggcggcgatgggaaggacggcgggtgctgcggcggccatcccgctgcgcgatcgcgaggacgtcgatgctgatgctcccgtgggcgtccgttcggccatcccgctgctcgtggccggcaatgcggccgtgctcatcggcatcttcgtggcgcgcctcatgttctacgcgctgcaggtgtagaggcttcggccctcgaggaccttcaagccgccgacgccggaaaggccgtcggcggcttttttgtttttgtcgcacgcctgagcttgtcgcgtggcggcgcgtgtcgcgcggcggcacgcgcagtggcggtgggggcgcgcgaagggggcaggcgcgctggtgatgcaaattgtcccgcggagcggtaaaaacaagtcagtttggcaattatgatcgatataatcattaaatagcacatcgcgctgatcaggcattttgaaagcacgcctgacatttcagcccaagataggtgccaaccgggctgaaatcgcgctctcgaaattgccaaaccggcttagttttaccctcggaaacgaaatttcgcctcatcgggcgtcggcggcgacccttcgctcgcgctagcccttcgaccgcatgttgtccgctgcttcggcgtttgatcggcgctggattgggatgtgacacgcgtggaaacgacgttggaaacggcggcaaggcgcgtggaatccgcgttggaacgacgtgggaaacgcgcttgatttggcggcaacgcgcgttggatctgcgcaaacgaaacgtgagaccgcgtcgctatactgagaagcacggattcgatccggcggcttggtgcctcgccctctcattattctagaaggatggaggtgaagaccatgaccgttttggggattgcttcgttggcgattttgctcttggagttcgctacccgcgtcatcgagctgtttctggtgataaggagcgcgctcctaacccgtaggggaaaggagcgccacaagtaaacccaaaccgccgaagcgatccgagagccgtggggagcaccacctccctgcggctcgcccttattatacaaaaacgaccgtgctccgccaagaggatcgttgcgcaacgatcgggacgcaacagacaggtgaaaaacgcgcattccggagccgggcgaggatggcgggagggagatctccccgttccttcgtctctttcccacgctttcgccttgcgcgcggccttggctcggcgcgtccgaaacggtgtaatcatgtggtaacatggaaccatcttctacatcggcttcccagcgccgtgcaggtggggtggctcctctgatgcaaaggcggtacgagcatggagcgtttggcggcggcctcgaacacggtgccgggcaagcccgtgaccgtctccatgaagaacggccgaacgactaccgactgcatcgtcgtgcccgaagacggcgacctgtgacgctcgtcgcgccgcttgcgcccggaagccctgccgcgcccgcagaggcgatgctccctctgcgggcgcggtgtctcgcgcgagcggcaggagctccgatcaggacagcgacctgcgatgacgggcgcgcgacgcaagaaccagcgcgccgcttgcgagggctgcgcccagggcgatggcgaaagccgggctgtcgccggtagaggcgagcgccttcgcagggggcgcagcctcgcgttcctcatgcccggcggaaggcttctcgccgatgagccccggctggctttggccgtctttcaccaggtacgcgtactcggtcgcgctggcctcgccggtcgtgggcgtcgctcccgcaggaagtatcgccacctggaacgccttgacggggtagccgtatcccgacgtgccgttggcggtgccgtcatgcgcccaagccatccagccgacgcctttcacgtacaggcggtagtagacggtgtagcgcgcagcctcgtcgcccgacaggctgacgcgcagcgcctgcacgggctgctccatctcgcccgcgatgtcgccgttctcaaccgccgggctccacccgcttccgttgtcgaccgcgtaggaaacgttcaagccgccgatggacgtctcgatgcgcagcgcggtcacgtcgtggccggcggcgtttccgctcgtctgcccgtcgatgctccaatcgacgccggcgtcctcgtaggcccagccgtcctcgaagctgtgccactggtagtacacggcggcctcggtgggggcgagtgcgatggcgaaggttccgtccaggttcctctcgctcagcccgctgtaatcgcggccgttccacgaggcgacgaccagcttgtccgtcgcctcgagcggcgtgaggtgcaggtagagcgctccttggtcgtcggtctggacgtcgcgcatgccgtaggtgctgccgccggtcggctcttccacgaattccgtgtcgagcagacgcatctgcaaggaggagatgggcgtgttcgccggaagcccgtgtatcgttacaagcgagaggtcgtcgttgttttcgttgacgaagcgctgctcgtcctcggaggcaagagacgttgcttcctcgtccaggtcggacgcgagcgcgacgggggaggcgagcaggaggttcaacgctgccggagtcggcgaagctgatgccgacgccaaagacgccgccctcgttgaaaccgcctcgttgcatttgaccgttccgccggtgatgacgggcgccttgacggagctggtgatagccgcgacccgaccggctccataagtgcccggaccgccgacggcgttgatggtgcccccgctgatcttgatttccccgcacgagtcgccgacactgcaacctatggctgcagacaggtcgccgccgtgcgcgttcactatgccgccgctgatggtgatggagccgcacgagccgtaatggtccgacccgatgccagcgacgaacttggagcctttggcggtaaccgacccgccgctgatggtgatggacttgctcgccgtgatcgctgcgcttccactcgactgactgagcgtttcgacagtgcctccggaaacaacgagctttcctgcagtaatgccattaccgcccgttactcccgaatgagcgagaaccgtgccgcccgctatcgagatggtcgtgttcggctctcccaggatgcaaggctgacgacctgtgcctgctcccacggcattcaaggttcccttgccgttgatggtaagagacgaggtgcctcgaaccgccacccccggcgacgcctccaatctgtggccgcatatgtaattacttcccaccagcgtgagcgtcacgttcgaggattcctcgattgaagccgcaacgccgctcagatcctgaaagcgcagcgcgtgagtacctttcctcacgatcacctgattgcttacggggaaggaggtaaaatctgcggctcccgtgacagccaggtacccgctgtagcgcgtccaactcactcccccgtcgagggtgtactgcggaatgccctccgaactcacatcgacgatgagcttgcagccctttttttcgtgcatgctgacgacggggttttcaacaggcgggtcgggaatggccagatgaagcgtgtatccggcttcggcagaacccttgatcgtgccttcgtatacgttgccggattcgctaaagctcatcttgacggagctgccgtccttaagcaggtttctgtcgagaaaaagtcccagatcgccgtcgtccatccaagtggcgaagccgtctacgatgtaatgcttggcatccacccaccgatcgcctctgacaaagacagggcctttctcaccaaaactggctccgagcagattctcacctgccgccaagcccgacaccagaacatacgcggaactggggaaggagccgccctgatcgacggcgagcgtcgtgttggcgggcgggcgctgcgagaggtgaatgttgccgccgccggtgacgatgcttttcgcggtaatgtcgcaagtgcctgaggactgcaaggtcaccgttcccgaaaagaaagacaccgaccccgttgcatccacagcgctcgaggtcgggtcgccgagggcaggggcgccgttgccgcttcgcgcggttacgttgccgggttgccaaaactcgatggtgccgcaacttgaaaccgcgctgtccgcaccgatggcgggagcctcgtatcctccctgcgcttccagactgccgtagagatcgcctttgaaaatcagatgagccttaccaggtgcgaaaattgcgggatacccgctcgaaccggaaagcttgttcgagccatacagccagagcgtaagctgcgcagcctgcgtgtcgctgccgatttcaatcgccgcgtgattggcgcgcggctcgttgatggtaacgccgttgagaagtatcgtatgggttccgttgagcacttgcacgttcgtgccgctgcctgccgttccaccgatcgtcacgttgccggaataggacgtccacgttgcctcgttgtcctggctgtattggaggttcgagccggagtccttcaagaggatggaaccgtccttcaggtcgaggtgcggcgcattctctatgggcgccaaggctgccacctcgggcggggcttcctcgagtggggccgcgtcagggagagtcgcatccgcctgagccgttgccgctggctcgtcttcagcccaggcgtaatgcgcgggagcgaactgtgctcccgccatgagtgcaagcgccgcggcgagtgcgaacgcgcacagcttccgtccggatattggcgattcgacatgcgatgcagcgttcatggcagctccgatcagggaaacgtgcggcgaacccagatggcaagaagtatagcatgcgatcaggtgagactttgctgagggacggtcttgattacgtcgcgagagctcgcccggtgcgttttcgcgcgttcgtcccgctgcgtggaaacggcgttggaaccgcgtgcaaggcgcgtggaatccgcgttggaaacgatggcaaggcgcgtggaatttgcgtgggagcggcgttggaaaagggcaaggtcgggaaggttttccatggtgatgcgtgccatggaaacgtggaacgggctcgctatacttatagatacggattcggtccggcggcttggtgcctctccctctcatattctagatgaacggaggtgatgaccatgaccgttttggatttgctggtgttggctgaagtgcttatgaggctgatgtcccgaatcatcgagattttcctgatgataagagacgcgctccaaacccgcaagggaaaggagcgctcacagtaaacccaaaccgccgaagcgatccgagagccgtggggagttagcgctccctgcggctcgcccttattatacaaaaacggccgtgctccgcaaggagaatcgatgtacaacaatcggggtcgcgcgcgaccttaggcaaagggtctcgaagcgggcttccgcgcactgcagcgtttctattcctgcaagtcgttggggtcgaaggactcgatgaggtcgagcagctcctgcttcttgtggatgtccagcttcgcgtagatgcgcttcgagtgcgtgcggatggtgttctcggtgaccacgagatcctcggcgatgcgcgccacggtgttgccgcgcgcgatgagctccatgacctccgtctcgcgctcgctcagacggtaatgctgctgcaacagcgccgcctgcttcgagatgcggtcgaggtacacgcgctcctcgcgcttgcgttcgcgctgcggcttgcggctcgcgcgaggcggccgatcgccgcgcttgcccgccttcttcggcaccgcgtcgtcgggcttttcgccctccgcgttcgcccctgcaggcttcttctcgggcgcatgcgcgcgtagggcgaccagctcgatgctggccgcggcatcgctgtcgtgtttgaagatgcggcggaacccgccctgtccgatgaagtacatgagccccagcaggtacacggccacgagcgccaccacggcgagcggcgcgatgccgatgatcatggtctgctcggcgaacgtgccgccgatgaagcccacgtcgtgcagcgcgtacacgatgccgccgaagaacccgtagatgaacacggggttgatgccgcggtcgcgcgaagcttgcgcgcattgaatcatcatgagcatgatagccacgctgtacacggcgtacaggccgccggccagccagcgcgcgtactcctcgggcagaaacggcagcagcagaaacgaggtgatgacgaacgggaagaagacgcggtaggcgcccaccacgttcacgctgaggttcttgaactgccacagcaccagcagcgatatagccgcggtcaacgatccgcccatcgacagcacgttcacgagtgatcccaccgccggctcgccgatggccagggagcgcatgatgcccgtgcagaaccccagcgcgcccacgcatagcgcgcttcgccagtagtcgttcaccaggcgctggtacacgagcggatggtcgcgcggcacgtcctggaacatggcttgatcgaggtcgatctcgcggcttttcagcacaatggtcaacccgaatagcggcaggaacacgagcgggatgagaaacgccgtcaccgcttgcggaataaggtacagcgagaagtacagcaccgccgcgtatagggtacccttgatgaggtcgcggttgccggtgtcggaatcctggctggcgaacaggcgttgccacagcatgtagaaaccggccgaccccaggcccaggagcgcgccgccgctgacgacgagcggcagcgcccatgcgtccagatagatggccgcgatgaggcagcaccatcccaaaaggtagggcatggtggccagccgtacgatgaatgtgcgcgtggggccggggaagaagtacgatcccagggcgctggcgaagtagctgaacgagaacacgagcgattgcgcgaggaagaaccagaacacgatctcggtggtttggaactccatcggaagaaacgggaacacgccgccccatacgcccgcggcgttgatggccaagaacaagccgtagccgagcgaggtgatgttcggcttcatgatgctgacgatggtggctgcgttcaaagatcctcccccgagaccgcgcgcatatgcggtttttccgttcccgcacactgttcccgttgcatcagtataacggtattgtcagaagtatcgtgcgacgcattacccaaagtgctgtcttgtgacctggggaaacgataagttcgcatattttatgtgacacggcggtcgcgggggagtgccacaatgcgaggcgttccgcccgggaagcggagcgccagacgagagaggaaagagggagggaccatgacgaacatgttggagaacgctcaggtgtctcgccgcacgttcatgaagggctcggcgctggccggcctgggtgcggccgcgatgggcacgggtgccgtgtcgctgttcggctgctcgccgagcgccgacggcgcgaagggcaatgatgctgcgacgcaggccgtcgaggagaccacgacgtggggtcactgcgccatcaactgccccggccgttgcagcctgaagttccacgtgcaggacgacgaggtcgcctgggtggaaacctacaccagcaaggatgccggcttcgacgaggttcagccgcgcgcctgcctgcgcggtcgcacgtatcgccgctggctcgccaaccccgatcgcatcaactaccccatgaaacgcgtcggcaagcgcggcgagggcaagttcgagcagatctcgtgggacgaagccgtcgacacgatcgccagcgagctcaagcgcatcatcgacgagtacggcaacgagtccgtgtacattccctacgcgacgggcgtgagctccacgacggcgcgctcgctgccgcgtttcatgaactgcctcggcggtttcctggggtcgtacggcgactacagcgccatgcagatggaaatgatcgtgccccacacctacggcgcatccggcttcagcggcagcacgctcaacgccgccgaggacgccgcgctcatcctcgcgttcggcacgagcccgaccgagacgcgccagggcggcgccgtgtcgcactacgactgggtgcatctgcgcgagaccacgaagggcaagatgatctacatcgacccccgcatgaacgattccgtcatgggccgttccgccgagtggcagcccatcaaccccggcaccgacgccgcgctctgctccgccatcgcgcatgagctgatcgcgaacgaccaggtggacaaggagttcctggacacgtactgcgtcggcttcgacgaggacaccatgcccgagagcgcaaagggccagaacaagtcctacaaggactacatcatgggcaccggctacgacatggtggagaagacccccgagtgggccgcccccatctgcggcatctccgccgaccgcatcaaggagctggccgccgagatcggcgaggccaagccgctgtacgtcgtgcagggctggggcccgcagcgccgcagcaacggcgagctgaactgctggtccatcatgatgctgccgctgctgaccggccaggtcggcctgccgggcacgagcaacggctgccgcgagggctcgttctccatcagcctgacgtccctgccggccggcgacaaccccatcaaggcgaagatccccgtcttcctgttcaccgaggccatcgaccacggcaccgagatgacggcgctcaactccgccgtgatgggcgcggacaagctcaaccagaacatcaagtgcatgctgaactacgccggcaactgtctgacgaaccagcatggcgacatcaactacgcgcacgacatcctggccgacgagagcaagtgcgaattcatcgtggtgtgggagacggccatgacggactccgccaagtacgccgacatcctgctgcccgacctgttccgcttcgagcaggtgtcgcagatcggcaccggcggcgacaacgcgtacatgatcagcggccagccgtgcaccacgccgaagttcgagcgcaagaccctctacgacgccctgaccctcatcgccgacaagatgggcgtgaaggagcagttcaccgagggcaagacccaggaagagtggatcaaggagctctacgagaagacgcgcgagaaggacaccgaactgccgacgtacgacgaggccatggaaatgggcgtctacacgcgcaagaacccgaagggcgcgactatcgcgttcgaggccttccgcaacgacccggcggccaacccgctggacactcccaccggcaagatcgagatctactccgagacgctggccggcatcgcttccacctgggagcttggcgaggaagacctcatctcgcccatcccggtgtacacgcacggcttcaccgagaccgacgtgcccaccgacgagttccctctgcgctgcagcggcttccactatcgcggtcgcacgcactcctcgtggggcggcatcgagctgctcaaggaagtgaacccgcaggaggcgtggatcaaccccgccgacgctaaagagcgcagcatcaagcagggcgacaagatccgcgtgaagaacgcgttcggcgaaatcgagatcctggcgaaagtcacgccgcgcgtggttcccggcacggtgtgcatctcgcagggcgcatggcacgacgccgacatgtacggcgatcgcgttgacaagggcggctgcatcaacacgctgacgacgcatcgtccgtctccgttggctaagggcaacccccagcacagcaacatctgccaggtgaccaaggcgtagggcgacgagccgcagaaagggtgatatatcatgtctcaacaggcattctactttgacggcacgcgctgcacggggtgcaagacctgccagatggcgtgcaaggactacaagaacatcgatctgggcatctcgtttcgccatgtgtacgaggtgaccatcggcgacaccgtgaaggatgccgacggcgccttcagcaccacctgcgtcagctacccgctgtccatgtcgtgcaaccactgcgattctccggtttgcttcgagaagtgcccgcagagcgccatcatcaaggacgccgacacgggcctcatgtccatcgacgaggagaagtgcatcggctgcggaacgtgcgccatcgtgtgcccgtacaacgcgccgaaggtggacgaggagaagaagaaggcggttcgctgcaacgggtgcgccgagcgcgtggccgcgggcgagaagccggtgtgcgtcgaggcctgcccggctcgtgcgctggacttcggcgacgccgaggagatggcgaagatgggcgagcgcggcaacatcgctccgcttcccgacccgtccgaaaccaccccgaacatctttatcaaggcatccgcggacgctcagccggtgggcgcggcggaaatcgccaacccgctcgaggtcgcgtagcaggactgttcgcgtacgacgccacggcccctcttccctccgtgaggggctcgtggcaatctgcggcgcgaggcgcacgtcttggcggggtacgctaaaatacagcgtaccccgctttttgggatagggggagcgcttgcggttccgtgttgacgagaggaggtcgccacatgtcccagcaggcttttttcttcgatggaacgcgttgctcagggtgcaaaacgtgcatgttcgcctgcaaagacgcctacgacctcgacgtcggcaccgcctaccgccgcgtgctcgaatacacgggaggcgatacggttcgcaacggcgacggcaccttcggctccacctgcttctcgtacaacgtgtcggtggcgtgcaaccattgcgacgatccggtgtgcgtgcgcgtgtgtcccaccgaggccatgcacaaagacgagcagaccgggctggtcagcgtcaacgaccggcactgcatcggctgcggatactgtcatctgtcgtgcccgtatagcgctccgcgcgtcgatcgcgtaaaggggcactcggtgaagtgcgacggctgtatcgaacgcgtggccgtgggcgagaagccggtgtgcgtcgaggcctgcccggctcgcgcgctggacttcgggccggtcggcgatatggagaagctcggcgagcgcgcggccatcgcgccgtttccccggcccgaggcgaccgtgccgaacctgttcgtcaaaccgtccgccgatgcccgtcctgcggaatcgaaggacggcgtcgtggcgaacctgttggaagttggatttcgggcaaccgataaggagatcatggaatgagcgaagaagcaaccgtgccgctgtccgaggatgtgcgcgaggccatcgcgttcgtcggcgagacgctggggccgttctacctgcaagacccggtgaagggcgatgccggcccggccttcgcggccatggccgcgatcgacgttgcgcaggccgccgtggagtggccgttcgtcgacgaagccgaggcgcggtgcgacctcgatctcatgcgctcggggttggcggaaggcatcgacgccgacggcctggtgtgggaataccgccgcctgttcatcggtcccgcgccgaagcccgcgccgccttggggctcggtgtacacggatcgcgaatgcgtcgtgttcggtgcgaccacgttggagctgcgcgcgtggatgcgctctcacggcatcgcgcgtcagacggacgacaagacgcccgaggatcatgtgggcctcatgctggtgctcatggcctggatcgcgcgcaaccagccgcaggatctaggcgagtttctgcggctgcatctgctcacctggtcgtcgcacttcctcgaccagctgatcgaggcggccggccagcccttctatgaaggtctcgcgcgtctcacgaaggcttcgctcgaaggcattcaggccgagttgggcctggacgtcgtctacccgaggttctaccgctaggatagcctgcatgatttcaggattcgataccgcgctcggcgagattacgctcgtgctgttcacgacgttggcaccgtcgggcgtggttgcgttcatctgcatggggcttcccgtgctggggcgcggcgcgtccgttgccctgcgtcagcggctcaacgtgttcttggggttgcccctcgtggttgccatggtgggtctcgtcgcctcggccacccacctgggcaaccccgctaacgcgctgtacgtgttccttggggtgggacgcagccccttgtccaccgaggtgttctgtgcggtggtgtttctggcgctggccggattgtattggctgtacaacttcgtcgagcatcccaaaccgcagttacagcgagcgtggctcgttctggccatgctggcgggcgcggtgttcgtggctgcggtgggctgcgcctatgccgccgacaccatagtgtcgtggcacacggtgtacgtgccgctcaatttgatgctgaacgcgctggtgggcggccccatactcgccatcgcggggctgcgcgccgcgggttacgagccggttgaaggccgtatgggacgcgtgctgacgatggtggccgctgcggcgttggccgtgaacgtggtgacgttcggcgtgcagggtgcggatttggcctcgatcgagaactcgtatcttacggcggcggaactggtgccctcgtacggtttgatggtatgcgcgttcggcgtgcttggcatggcgggcattggcctggacgccgtcgaattgtggcctcgacgggttcggctgtcggtcgggcgcgcggcgggagctgccgtgctcgtgctggccggcatcttcgtcatgcggttcgcgttctacatgatgcacatgacggtgggtctgggcgtataagcctaggagtccttgtccgcctcgaagaagcagaagtgcgccttgcccttcgatttcgctcgatacagcgcgcgatcggcgcgctcgtacaccgtcttgaacgcgatgccgtcctgcggcaccatggcgatgccggtcgacaccgacagctcgatcacgcggttgtcgggcagcgtcgcgttccaagggccttccgacagctcgaccaggcgcctctcgatatcgtcgcgctccatgtcctcgcagtacacgacgaactcgtcgccgccccagcggcagataaggtcgcccttcctgaacgcaccgcacaaatgctgcgccacgtcggccagcaccgtgtcacccgacaggtggccgtagcggtcgttcacctgcttgaagtcgtcgaggtcgatgatggcgaacgcgccgcggtaaccgcgctgcagcgtgcgctccagcgcgttggccatgcgcaccgaggcgctttggcggttcagcaggccggtcagcgcgtcgtgctcggccttgtcctccagatcgagctcgcgacgcttgcgctcgtcgatgtcggtgaccgacagataggcgtacacgtagccgtcttcctcgagctgcaccatgcggtagctcagctccatccagcgttcatcgtcgttttcgccgagtcggtactcgagggagtcgttgcgctctccgtcggcgaaacgctgcagcatgtcgtcgaaatcgaggaagttctcgatggcttctgcgtcctggcttgggccgatgtatttgccaaggcggtcttcgagcatgctgctcgaccagtcgtccagcgagattccggcccaatagcgccatgcgcggcgatcggccgagttgaggaagctcttcgtgttcacgttgatataccagtgatccaccgcggcgcccttgaggatgtcgagcagccggttgtcgtccgagcgcgtcagtttcgcccgcgaatcgttcaaaggatcttccaggtagccgatgacgcgggcgggcttgccgttcgcgtctggcacgatctcgcgttctatatgcagcgtcagcggctctcccgtattcgaccataccttgatcgtgcgagaggcaggtctgccccataacgtttcgcgcgacagcctccgcaggacattgctcacgtcgtcgcccaggctggcggtgtcctcctcgtccgccgaggcggccaaaagggaggcgatgccgttcgacgagaggttctggaacgacagtcggtcggaagcgatgtcgtacacccacacgttcagatccgattgctgaatgatgcgatgcaggacctcgtcttccaattcgagcaccgcctgcgactcgcgcagctcgtcttcctgctgtttctgctcggtcacgtccgccagcgaggcgaagaagatggtgcggtcttgctcgcggcgcaggaagaaggcgcgcatgcgcatccacatgatctcgccgttcagtcggtaccgacgaaaggtggcttcggctcccgtgacggggcgctcgtacgcttcggcgaacatgctttgtacgaggggcagatcgtcggggtgcacttggcgtgagatccggttctgtcgttcgcgcagatcgatcgagttgcatccggtgacgtggtagtactcgttgttcacttgcagcagctcgaaacggtcggcgtacacggcgtacacggctaagccgccgatcaggttgtttacagcagcgcggcttaccatgtcgtcgtgcagcagcgcgttcacgtcgatgagctccatgctggggttcaacacgcctcggtagtccacgatgccgtcctgcgacagcagttgctcgagcgcctcggtagacatgggacggtaaaagtagtagccctgcgcgtaatcgcaacctatgccttgcaggaagtccacctgctccttcgtctcggcgccctcggcgatgatgcgcagatccatgaatcgagccatggacacgatggcctcaaggatgctttcgctgcgttgagactgatcctgtcgagcgaggaagcccatgtcgattttcaagatgtcgaccgtgatgtccttcagcatgttgagcgaggaataaccgctgccgaaatcgtccatgaggatggtgaagccgagtcctttgagacgggcgaccgcatcggccattttctcgtcttctgcgtacgcgctttcggtgatctcgagctctagcaggcgatggtcgaggtcgtatcttgagaccaggccttccagcgcttcgaccacgtcgatggcgtacaggtcggcccgggagatgttcaccgatacgggaatgggcacaccgccgcgatcaatccatgaacggatatggcggcacgcttcctcccatacgtacagatcgaggctggcgatgaagttgttgcgctcgagcacggggatgaacgcgcccggcatgacgatgccgcgcgaagggtgctgccagcgcacgagggcttcgaggcccacgatgcgctcggtgcgcgtgttgcattgcggttgccagtgcagcacgaactcatggttcgtcagcgcgcgcttcacctcgagcaggatcttcgcctcggtctccatctcctcggtcatctcggcttcgtaccaggcgatgcgcttggtgtaggcgcctttgacggagttcatggcgatcatcgcatggtcgcaggcggtgactacggacacgtccgggctgtcgatggcgcacactccgaaagcgggctggaacccgatggtgtcctcggaatcgaacggctccttcttcagctcgctttccacgcgtttttcgtcgatcaggccgtgaggcagcagcagcgtgaaatcgtcgccgcccaggtagccggctatgccgccgtgcttacgggcgatctccccgatacgtgaggcgatggcgcgcaagatggcgtcgcctgcttcgcgcccatgccactcgttgtatattttgaagtgctcgatgtcgatgtacgctgcatcgtacgcgatgtcgggcatgtcggctaccaggtgttcggctttgtcgtaaaacgtagccgcattgtacaggccggtcagctggtcgcgttcgcgcaatagctggatttgcgagcgttctgcctgatccgtgcgtcgctgcatctcttcttcgatgtccgcgatgaagcacatgaccacgcgctcgccgcttccgccgcgcttgacgggtgccacggtcagcgacgtccagctccatgcccccgattcgaggtgcttgcggaactctccgcgcagtgcgccgcctgcttgttcgatgcggtcgagcaacgtgtcgaaatcccagaacgcatggaagcgatcgcggtcttcggggtggatcatgcggtcgcgcacgtcggggaacatgtcgctgatgcgtccctcgagcggaggcgtcgtgaattttccgggctcatggtagagaatcttgtatgcatcgtcggtgaggttgagttcgaacagctcatcgtaagatgacggctcgctcaacgacgtgaacaagctgcggctgtgctcgtcgacgggatggccggagaacagcacgcaggggccttcgttgaaccagtccagctcgaggcaggttatctcgtaccaacttcccgtgcgcgcgctgtagatgacgctttgcgtcgcgtgctcgttcgactcggcgttccaggggcagtccttgcacggttcgctttgcccgcggaagcattcgtagcagagttcgcccactcgtccaccggggaatacacgacgggccgcacggtcgagatacacgacgcgatacgattggtcgatgacatacgtatggccttgcgtcgaggcgctttttcgtcggctgcccggcatcggatctcctgtctcaagctctttgatccattgtagggcttcggcgacgggttgggttcggcaggcgcaaaatgatgccatggtctccggttgttcgtccgtgtgcggacgcccacgaggcgtccgcgccggcttttccgacgacgtgaacgggaaaagaggagatggtcgggatcggggcatgaagatgcccggcggtccgcgatagggggaggggcggacggccgggccgatgggtcgatctggttcgccgcatgaggggaggggcggcggcgcaagatcgaggcaagcggggccgggggagggggatcgccccgcttgcctcgatcggttccgggaaggctgcagtttccttcccggaacgcgaccggggtgccgcccggcatccgaagatgccgggcgtcgtgcggttagtacatcaggaccactgggtagcccagctggtagatcagcacgcgaaacatcacggaggtggccagcgcgccgatggcggcgacgaccatgagcgtcttggaggcgcccaccttcttcttcgccacgaaggcgcaggccgcagccacgatcacggagacgatggagccccagaacatgggcgctcccgcgccggacaccatgacggtcatcaggctgtcgacgtgcgtgggggccgtggtcatcgatgtcgggtcggcgtagtagccgaattgcgcgatcttcgccatggcgcaggcgatgacgaacaccacgtcggccacgatctgcacgagggccgcgatgaacatcagctggatgcccgtcgcctcgacggcctcgtccttcttcaggatggagatcagccagacggccgcggcgcccaggaggcacgcgttgcccagatagaacgccacgagcgccaggccccacgcgggacgggccggcatgaggtaggagtgcgcggtggcgaccatcatgagcacggcaaccgcgagggtcgcccaggccagcgccttgggaacgggcttgccgcctcgaaggaccacgaaccatgcgacgatgacgatggccagcgccacgcatccgatgagctcctgggtgatgcccgacgtgatgtgcccgaagccgttgaagatgcgctcccagtgctcgaggtgcaggaaggctccgatgccgcctaccaccagcgagacggcggacgtgatgagcgcggtcatctgcaggttcctgccctggcccttgagcgccaggatggacatgccgcccagcgtgccgcaggtcaagcatacgaacagcgtgaagatgacgagaggccactgcgtttccattactcatcacctccttcccagtgatggtcgcgtaggatgtaggagtacgacggcttgttgcccacgtcgggcagcttgtgcacgtcggcgtcggtgaacggctccaggaactccaccatcttgcggcgcttgcccagcgggtcctcggagccctcgaacgactcgtagccggcctcggtgtcgccgatccagcgggcgttgccgccgcactggctgacgcactggggcagctcgccctgcgacagcttctgctcgcacagcgtgcacttctcgacgaccttctcctcctcgttgaggtagcggacgccgtaggggcaggccatgacgcagaactggcagccgatgcacttctccttgtcgatctggatggagccgtcctcggccacgtgcgacgcctcggtggggcacaccttcacgcacttggggttctcgcagtgctggcagctgatgggcaggaagtacatgtacacgtcggggtactgccctgatccgcccgggatggggttcggccccacgcgcaccactttgttccagtagctgccgatgggcacgttgttgaccgccttgcaggcgaccgagcacgccaggcagcccacgcaccggttgaggtcggtgatgatagccttcgtcatggtttactccctcccttcgtaggtaggcagccattccttcagacgggggtcgtcggaggtatggatgatgggcgtgccggtggagtcgcacggcacggggttgttgaacggcgagttctcgggcgtggccttgtagatcttcacctggtaggcgcgcaggttggatgtgccggagtgcggatcctgggcgtagtggtcgatcagctggttcacctgggagaactgccagccgtggccggcgtccttcacctcggggtaccaccacgtgtgctcgaggttgatgacgtcttccttcacgccgtagtacaggtcggccacttcgcggatcttgccccattcggtttcgatccacacccagtcgccctgctcgatgccgtactcggcggccgtcttcgggttgatctccacgcgcggcacgggccacagctcgcggcaccagggcagctgacgatgctcggagtggaagtacaccgggatgcgacggccggtggtggcggtcagcgggtactccttgatgcggtcgccgtccttcgggccgtgaggcggctcggtgtaggtgggaagcctccactcgggatggtcgggatggtgcgattccatgacggtggaccagatctcctgcttcatcgtcggggtgaaccagcccggcttccagtcgccgatgcccttgccggccgtgtagtcgaggcggccccacacgcggtcgcgtgcgcgcatcgcgccggtctggtagcggcggtacgtgccccagttgcgcggctcgatgtccttcgcctgccaccagccgtgctcctggaaggccttgacgtactcgtcccacgtcttgtacttgggcgtgacctcggccatcggaacgccgtggcgctcgaacgtgggcttgccgttctcgacgtgccacgtggtgtaggtcagctcgtcgtcggtgagcagcttgatggagtcgtccagctgccagttgatgtcgggccactcgttgcccggctcgtcggtccacttccagttcatgcggcgggcgaggtccatgacgatctcgggatcgtacttggcttccgcgggcggctgcacgcacttgaccgtggcgcccatggcgccggcggaaccttggctggcgcgcggcgagttgagctcgatccaatgggccaccggcaggatgatgtcggcggtgtcgttctgcggcgtgtgccacaggttgaggtccacgtagaagtcaagcgagcacagggcctcccaggcgcgcgtggtgttcgtctggctcatgaagttgccggactcgttccagagggcgcgcaccgggtaggggtcgcccgtgatgacggcgtcccacagcgaatggctgtcgcaccagtactgccaccagcccagaagcgggaacttgtcgatgccgatctgcttgcggttgacttcctccggcggggtggtggcgccgggggcccaggcgctgaagccctggaggtcgccgtcgatggggacgatggtcgggccgcggttgccgcccggggtgtccatgttgccggtgatgcccacgaggttgtcgaaggcgctgcagttctggatggcgctgcagaagtgctcgaccgccagcatgtactggatgccgccgttgccgtagccggtggacgggtcgatgcgcgtgccgtaggccgtggccgccgcctcgatctcggaggcggggatgccggtgatctcggccgccacctcgggcttgtactcggcggcgcgggccttgtagtgctcccacaccggcttgaccttcacggtcttgccgtccttcagcgtgatctcgaactcgccttccagcgcggggtcgatggcggggtcgaacggcatgggatcgggcagccagccctgcgtctggcccggcagcaggttgtcctgcgcggcctcgcggccttggcgcgccttctcggagtcgtagttctcgccctcccagaagccgccggtctcgtcgatgacgccttcctggtcggcgttgaaccaggtgaacgcgccgtattcgtgctcgatgccctcggccttcagcttctcccagttgttgtcgtacaccaggaacttgtaggggctgccgccctccttgatgtcgctttccttgagcagcgcggttttcacgtcccagtaggaaccgtcggtgcgcacggtgggaaagccggacggctccatgtcctcgcacacgaggaacggggcgttcgtccacttcttcacgtacagatcgtcgtaaagcttcttctcgatgatgacgttcgtccaggccagtgccagggcaccgtcggtgccggggcgcaggtgctgccagtagtcggcttccttgcccatgttggccatgcgggggtcgacgctgatgtgcacgtcggcgcgcgacgccacgtctacggtggtgcggcaggagtcgtcgtagttggacagctcggacgcgccgccccactgcacgtacaccttcgggcgcgtgatggtttccatccacgacatggcgaactgagacaccatggtggtggcgaagtggcgcgggcctttgcagatctgccaggcctccacgttgttcggcgtttccagcatgttcttcaggatggactccgagtgcatgcaccagatgcgcgacgtgcccacctggcaggcgatagcctcgccgccgtgcttggctttgatgtccaggaagttgtccacgatggactgcatggcctcgtcccacgagatacgctgccagccgggctcctcgcccttcgggttcgtgcgcttcatgggatagtgcaggcggtcggggtggtacgccgcctggatggacgactgcgacttcgtgcagcagttgcccatggactggaacgctccctcgtccccttcgacgcgtatggcccgcccgttctggacgatgaccttgacgccgcactccatcttgccgcagccgcggcagcacgttttcacggccacggtgtcgttgccggacacgctgctgtacgtctcttcggccagcgcggtgtgcgtcgaagcgccgaacgccgcggctgccgcaccggtgatggcggcggtcttgacgaacgtgcgtcgtgacatggtcaggttgcccatactcctcctccttctttctcctcgttctcgtcttgctcgtcttcgttcgggcgatcggggaggggggcttccgggcgaagcctcgggctccggaccggtgcaaagtccccgtgtcgcttgggttgaccatacggatgcgaggggatgcagagcatcgttcaaaggttggaaagcgggttcgaccgcatcataaattcttatgatcttgtgatcatgaaaaaatcgatgacgatttgaactggaaaaacatcaaacgaaggtcataaactattctgaaactagaataatttcctcaaagagggatgctcatcttttccgtataatcgaacccgtcgacagaggggtcggcgcgagcgacgttccgtacgggctcacagggggtggggcatggaaaagcttcggagtgcatgggatactgcgttggggacgagcctttccctcacgcgcatcgcgggtgcggccttgcaatggctctggatgctcatgatgttctacagcatcgtgccgtacggcttctcgtcggacgtgcgcggctcgctgtacgtcagcctgatcatatcgctggtggccatggtggtgaccatgctgttcgtctccgtcatcgtgcggcgcgagcgggtgagcggcaaccgctcgatcgtgctgggatcggccatcatgatgagcgcgggcagcgtgctcacgccgttctccgatcctaccacgcccgtcggcatgctggtgctgggcctgagcgcggtcatgaccggcacgggctcggccgtgctgttcttgtgctggatcgagctcgagtcggggctgggaggccgcttggcgcttgtggagcttgcctcgtcgctgtgcatcgcgttcgtcgtggggttcttgctgatcgtagggccggcgatacccgtcatcgtgctcatcgttgtcatgcccgtgctttcggcggcagctctcaggcgcagcgcgcccgatacgccgcagctgccgcgcgagcccgagcagcctttgtcgcgccatacggcgaccctgttcgcgaaggcgcttctgggcgcggtgctcatcggcatgttgatggggttcttcgacgtggtgtcggggttcaaaacctacgaggtgcaggacatcttcggcacgtacctgtttctggcgggcttcatcggagcgttggccatctgcctgatagccgtgttcctgcagcgcgacagcgtgttcttctcgtaccgcgtctccatgctgatgctgtgcttgggatgcttgtccacgccgttcatggccgacaacaacacgtattcgagcgcgcttatcttcggcggctaccactgcttcgtgctggtgctgtgcgtggtgtgcatcgacgtggcgtccagcttccgtgtgagcccggcgcggacgatcggcctggggttcgtggcgctgtacggcggcgagaccgcaggccagctgttcgcccattcgctggaggcgaccggggtcagcatgttcgacctcacgctggtcacgctggtggccgtctcgctgctgttcatcgcgcatctgttcctgttcacggagaccgacctcatcaaaatcggcatcggcgaggtcagcctgatgggcacggtgcccgaagaggccgccgacgacccggccgacccggtggatccgtgtgcgctgatcgcggagcgcttcgccctgtcgccgcgcgagaccgacgtgcttccgctgctgctggagggccgcaccatctcgcgcatccaggagacgctgttcatctcggcgggcacggtgagcacgcacatccggcacatctaccagaagacgggcgtggacaaccgccaggagctcatcgacctggcccacgagacggccgcgcaggacgaggcggtctgaggcgatggagacggcgcatctgcacgagttcgcgaaggtggccgattgcggcagcttcacggccgctgcgcgcgagctgcatctgacgcagtcgacgctgagcaagcacgtggccttgctggagcgcgaattcggggccgacctgttcgtgcgcgaccgcagcggcgtgagcctgaccgaggcgggcggcgtgctgtacgcgcaggcgcggcagatggagaagctgttgcgcgccaccgagctgctggtgcgcgcggcgcgcgacgggcaggctgcgggctcgactgccggtgtcgctgcgggcgggactgtcgacggctcgcccgcggccgcgggggacacggcgctgcgctgcaagtgccggctcgcggccgagcgctgcgggctcgaccggcgcgagctgggcgcgctcatcctgtacgtggaggagcacggcttcgagacgatccaggacgagctggcgctgacgcgcgacgaggtggccgacgtgctgggcagcgtgtaccgcaagctgggcgtgggcgacaagcaggaggcgctcgatttcatccattccgtttcggaatgatggtagacgcgcccgcggcggttgggcatactgcgtagaagtgaaagcgctatgaagctggggggcttcgagcaaagggcttcatccgaagaatggatggagaccgaatatgtgtgcttgtactgctgcgtccgtcgaagacgcggcgaacaatcttcttgaggaactgaatagcggcgcgaagtgcttgtgcgtggagcacgatgcgtccgacgacgttgcgccggcgttgctgcgcgcggctcgcgctcgtgtcgaggcggggtcgaacgtgcgcgtcgtgtgcgccgacgccgttgcagccgcgcgctttcgggcgcttgcggccgacgatccgctgctgagcgcgctcgatgtggtgtcggcgcgcgagctggccctctcgattctgggcgatgcgcaggtcggcgacgccgtgggacgcgacgcgcgcgtgctggacgagaacgagctggccgtgctcatggaggacgtgaaggtgagcggcctcaagccgggccggctgcgcgagatgctcaagttcttctacaagagcatcagcgactgcgccgacgatgacgagcgctggctgatcaccgccgaagagcagaccgtgcacgccatcctcaccgagaacctggaggcgcgccgcgcgctgctgccgtgcgaggtttcgtcgctggcgtatcgcggccttgtgaaagccggggtcgagcgcgagccgctgacgctggtggcagacgacttcgggtcgctcagcaaggcgtcgcagcgcctcgtgcgccatctagcgacggacggcctcgtggcggccggccgcacgctggcctcgtccagctccgaggagccgtatccgtgcttcgacgggttccgcgcgcttgccgacgaggccgactgcctggtgacgctggcgtgcgagcggccggccgcggcgcgcgagtcccgcgcgctggacgacccggcggccgagttcgcgttcgcggcggcgtccgtggaggagtgcctggccgacggcttccggccgggcgacgtggctgtggccgtgccgaacgccgcttggggcgagcgcatcgccgccgagctggaagggcgcggcatcgccgtggagcgcgggttcgacagcgggaagataaagggcgacccgcgcaccgagggccgttacgccgacctcaagctggccgcgttcctgcggttgtacctcgatccgcacgatttcacgtcgctgcgctcgtggctggggttcggcgattggctgctgcgctccgatgcgtttttggagctgatggcgtacgcgcgcgaccatgagacgaccgtgcccgaagccgtggcgcagctgcgcacgcagcgcgacgccgaccgctcctcgacgatcttcgggaagttcgacggcccgctggacgagctggacgagctgctgcgcgcctgcgctggcgggttgtcgcgcgatgctgccgtagcgctgttcgaagcgcacggaatgccgttgtccccgcgccacgtggagctgctgggcgacgaccctgcgcatgcggacatcgagcgcctggcgcgctgcgggttcgcgaagccggtggagaacgtcgcgcgcgacgccgtgcatgtggtctcctatgcgcgctgccacgggcgccatgtgcgcacggtgttcgtcaccggcctggtgaacggcttcttgccggcgaacgacgccgtggacgacaagttcaccatcgaccatcggcgcgtggcgctcgaacgcgagcgcgcgctgttcctggacgtgctgtcctgcgcgagcgaacgagcggtatgcacgcgcttcgtgcgcgaccttttagagaacaccgcgctcaccaaagtgcagacctcgcgcgtgttcgtgcgcgacggcgagcgcttcgcgcgcgtgacgccgtcggagttcgcgtcgctgaccgacgaggtgctctctcctgcgcccgacgcgccccgcgagctgccgacaaaggtgctgtataacgtttcgacggtctgacgaccgtcgaacctgctcgacgctgcgacttcgcggggcgcccgtccttggcacgatcccgaaagctcgcgtaccgaagtacgcttcgccttcgcgatcccgccaatgtcgggcaccgcgcgaaccctcgctgactttatctgacaagtgagcttgaaaggactgatagatatgagcgatgtcgatgtattcgtgatcgatgacgatttcgatcccctggccgacctgagcctggacgacggcgagcgggacgatgccgaggccgactacctgccgcccatccccgatgccgacaagagcgtggtgcctcccgtggtgccgttgtctgcgaccgagcgcatcgagaagctgctggcgggcattcccggccagcagttccgcctgctgcacgccgtggaattctgcaccgagccgaagacgatggacgaggccgtggccgatttggacgcggcgtatccgaacacgacgagcgtgtacggctcggcgcaggtggtgcagctgctcgagcgcgacggcgcgctggagcgcatcgtggacgaggacgccgcccatgcggccgccggcgacgctgccgatacgcccgccgaggacgagggcttcatctcggtgacgcccgctccgccgtgtcgctaccgtgccacgcaagcgggcctcgatgccgtcgcggcgcacgtcaacgagggcctcgtggcggagcggatcagcgaagacgagcgctatctgcccatcttccagcgcgtgcttgagatgtgcgcgcgcgaaggaggctgccccaccaaggagctggaccaggcggtggacggcgacccgctgtgccaagagccgcgccgcttctgcgggttcttccgcggcaagctggaagaaacaggcgccatcgaatggcgcgacgcctggaccatcaccgatctggggcgcagcgtgctcgcgtccggcttgttcgccgctgcctccccgtccgaacgctagagaaggagccacccatgtcccacgatcaggaaaccaccatcgccgacgtgctgcgcggccgcatggcaacctaccagttcctctcgcgcctgttccgtgtggaggtggatcaggagctgtacgacacgctggtgtccatgcgcttcccgacgaacaccggcaacgcgctggtggacgagggctaccggatgatctgcggctatctgagccaggccgacggcacggtgcttaccgagctggcggtggactacgtgcgcgcgttcatcgggtcgggcaacgacggcttttcggccgcgtacccgtacgagtcggtgtacacgagcccgaagcgcctcatgatgcaggacgctcgcgacgaggtgctggtgctgtaccgcgccttcggcttggacaagcaggaaagctggaaggagggcgaggatcacatcgctcttgagctggagttcgagcagatcctatgcgagcgcgctatcagggcgtacgaggccggcgacgaggacgagtgcctgaagctgctgctgtcgcagcgcaactttctggaggaccacctgctggcgtggtaccccatgatggcggccgacttgcagaagttcccgcagaccgacttctacaagggcctgggcaagctgaccgacggcttcctgcgcaacgaccgcgagtttttggacgccgcgctgtccgagaacgaagcggaagtcgaggttgcatgatggacgagcacggcatcgagcccaagcgcgatgcgggcccccgcgtgtcgcgccgcacgttcgccctgggagccgtgggagcgtgcgccgtcatcgggctgggcggcgtgaagtacctgcccagcgcaacgttgctgcgcccgccgggcgggcaggacgaggagcagctggtgcgcggctgcctgcattgcgagaagtgccgcgaggtgtgcccgaagcatgccatcgcccccgctcatatcgaggacggcatcttgaacgcgcgcacgccgcgcatggacttcaaaagcggctggtgcgatttctgcgagaacgagccaggcgggccgaagtgcgtcgcggcgtgcccgacgcatgcgctttcgtgccccgatccgtcgcaggcgatcatcggcaaggcggagatcaaccgcgactggtgccttgccgcgaagggcatgggctgccacgagtgcgtcgacgtgtgcaactacgaggcgctcgagctgggcgccgacaacgtgccggtggtggacgtggatgcgtgcaacggctgcggcgcctgcgagctggcgtgcatctcgctgtcggcaggttccatcacggccggcgccaccgatcgcgccatcgtcgtccgtccgaccgaagaagtggaggcgtgagcaggatgaagaagctcaaaacctatcggctgcggttcctgatcatgctggccctgctggccgtggtggccgtggggtacttcacggccggcggcatcggcaacttctgcggcatcggcttcgagtccatcacgctgctgtgccccctgggcgcgctgctggccatgatcgccgagcgcacagccatcccgatggccgtgatcagcgttgcggtcgtgctgctggtgtgtatcgtgctaggcaaggtgttctgcgcctgggcgtgccccgtgcattttatgtcgcgaggtaggaagaagacctgctattaggagtcaagggggaatccgagactttttgataggaaccttgaaaagtgaatgcgagataagaaagcgcacgccaacacccggccccatgcagggtgccgggcattggcgaagttcggtttttgcgatcgacgtgggctttcacgcctccttcaggtggccggggcggtggttgcggggaggggccggctcgtagggccgcccttccttcatcaccgccagcgccacgcccatgagcttgcgggcgacgcccgagagggcgacgtagtggtgcttcccgtccacgcccctcttcctgtcgtaatagtctccgaagtaggggtcgttcttcctggcgcagtcggcggcctgcatgaacgcccatcgcagcgccccgggccctcgcttggacatgtgcccgtcggacctcacggtctcgccggactcgcttctcgtggggtccatgccggcataacccatgagcctgtgggggtcgtcgaaggcgttcgggtcgccgatctcgcccgcgatgacggaggcgagggcgacgtctatgccggggatggtgacgagccacttgccctgcgtccgctccagcaggcgggccagctccctttcgacctccttgacctggtcctgcacgaagtcgagctcctccatcaaaagcctcgcctcgaaggcgagcgtcttggagccgaacccgacgcccacggattccttggcaagcgctttgagcctctcggccttggctcgcccgcacctcccgcgcgaagcctccctgaggatgcgctcgagcgtcccgacgtcggttccgagcacctggtcgggcgtggcgcagtgctgcagcagctcgcggcgggtcggacagtacgcgttgctgaacaggcctgcaagctcggggaacgtcctatcgaggatggccgtcgccctgttcttcaaggctgtggagcgctccacgagcgacatcctgtagcgggcgaggttgcgcagctcctcggtcgcctcgtcgccgagcgccgagggcgagtagcgcttgtagcggacgaggtcggcgatcatcgcggcgtcaagggcgtcggtcttgaccttgcggaccgtccagacgtcgcggaaggcgtcggtctggacggggttgatcaccgcggcctcgtagccgtgggaggagaggaagtcgaacagggccacccagtagcgccccgtggcttccattccgaccaagctgttctccggggtcgcgtcagccttgcgaagcctcttcagcatcttcgcgaagccgctcgccgtgttgttgaacttgaacgactcgacgacggtgcccccgtcctcgtcgacggcgcttgcgacgtggcttctcttggcgatgtctatcccgatgcagatcatggcgtcctccgatccctcgctttatggtgaggcagaggatcttcctctggcaaccgcaggcgcaacctcattggatatacggcgccgcacgccatcctgcctaattcgcgtccacctgcgggccggaggcgccagccttttttgaagagcctggctcctgggggggggtgcggcaagcgccctccgccccatacgcatcccttatctcacattcgcgtctgcaagaaaagagcgcggccactgcgcgagaagtggcaagaacaatatatgagggggacaaggagggtaaagggggcaaggttgcttccccttgctccgcgtgcgcttccccctgcggcaaagccaagggcatcaagatcgacagccgccatggcatccttgcggcggcgttgggctcctcgctcgtcttcggctttccggtgttctgcctcgtctgcccgatcggcctcacgtttgccacggtgctgctggtcatgcgcctgttcgcgttcggcgacgccacgtggacggtcgtcgccttcccggtcatcatcgcgttggaggtcctgctgctgccgaagtggtgtcagcgcttctgccccctgggcgcgctgctttcgctgttcagcgggctgaaccggacgttccgcccccagatggacgccgagaagtgcctgcgcgagggtcgcggcaaggcctgcaacctgtgcgagcaggcatgccccgagggcatcaacctgcacgatgtcgcggcgggcgagaccacgctcaacgattgcagcaagtgccgcgcgtgtgccgacgtgtgccccgagcacgccatcacgttcccgttgctgccgaagaagcaggcgcaggcgacgccgctgcccgtcgacgacgagatcccggaaagggggtaggtcatgtccctgatcaacggcctgctggccctgctgggcgagatcgagagcgatgccatcgccgtgcacgaggagcgctgcatctcggtgcgcaaccgcaatgccgactgcctgcgctgcgtggaggcgtgcacgtcgggcgcgctggcgtaccgcgcgggcgagctgctcgtagagcccgagcgctgcatcggatgcggcacgtgcgccacggcgtgccccacctgcgccatcgagctgcgcaacccgacggatgccgagctgacggcgcagctcaagcactccatcgtggcgacgaaaggccatccggtcatcgtgtgcgagcaggcgctcgaggcggccaacgtcgcggccgacgatgcgtcggccacgtgcgcggtgccgtgcctggggcgcatggacgagtcggcgctcgtggggttggcggcgtaccgcgccttcgacgcgacgctggcctgcggttcgtgcgagacgtgcccacatgctccgggcggcgcgctcgtgcgcgaggtggtggagggcgcgcgcaacctgcttgaggcgttcggatcctccatgcccatcgacctggaggaatgcgtgcccgagcgcgtgttggagcccggcgggtcgcacggccaggcaggcagcgacggggtggggcggcgcgacttcttccgctcggccaaggacgcatcgacccgcgcagctggcgcggcggtggccgaggagttggggatggtcgaggccgagcccgttcctgcggcgtatcgcaaagtgggcgcagatgggacgctgtcgcagttcgtccccacgcgccgcgtgcggctgtacaactacctgcagcacgtggggcaaccgacggccgacgaggtggagacgcgtgtcatcggcgccgtgtccatcgatgcccagaagtgcagttcgtgccgcatgtgcgcggtgttctgtcccacgggcgccatcaagaagctcgacgagggcggcgtgttcggcatcgtgcaccgtccgagcgcctgcatgcagtgccgcctgtgcgagcacatctgtcccgagcaggccatcgcggtgagcgggcgcgtgcctatcaagcagttcatgggcaaggaagccgtgtgcttcgctatgaagcgtccaacctggaccccgaacaagccctcatcgatgtacgataaactgcacgcgacgctcggcgaacacttggagatgtgcatgttctagggaagttccggcggtttgtcggccgccggaactgctcgacgctgcggagctccctggcacccgatctcgcgtcgaggccgaggactcgcgtaccgaagtacgcttcgccctcgccctccccacgatctcgggcaccagggagcccctcgctgacgctacgaacgaccggtgattttggaggaacgaacgcatgatcaactacacgctgccggatttcacggtggggctggggctcaacctgttcttcatccgcttgctggagcagcgcccggcgctgttccaggacggcgtgcgcatcgacagcgtgtacggctgctttcccgcgtgcgacctgaacggcggccgcgcgttcttgcgcgagcgagccacgccccggcagatggaggaggcgttctcgctcttggccgagcacggcgtaaaggcgcgtctcacgctgacgaacatgctggccgacgaggacgacctgcgcgacgagtacctgaacgcgatgctcgccatcgccggccgctacgatgccgaggccatcgtgtacgccgacctcgtgggcaactacgtgcgcgagcgctacggcatgcgctgcgtgctgtccaccacgcgcgcgctggcggacgcagccgaggtcaaccgcatgacgaagcgctacgactacgtggtgctcgactacaaccgccacaaggatccggcgtttctcgcggcgctcgaagaccgcgacaaggtggaggtcatggtgaacgagttctgcgcctaccagtgcccgcatcgtgcacagcactacctccacaacagcgaggatcagcggtcgggcgcgatgcgccccttcgagtgcgttgcgaagcgcgccgatttcttcgaccacgagccgggccacccggtgatcttcaccgatcaggaggtgcgcgacctgcacgacgagtacggcatcgggtacttcaaaatcgtcggccgcggcgtggccttccaaaccgtgctcgaggcctacgcgtactacctcgtgcgccccaagtaccgcgaagacgtcaagcgcatggtcatgcgcgccgcagggtaggggcggcggggaagagctgctggttttgcatggggtcaggcgtctgttgcacaaaaacccgtgacgtgcgatctgaaccgatgttttcttgtcgcccactctgatcggttttgaagaatccccaggtcgttgaatcgccctcgattgcagtgcgcggtgcattcgcgagagacggccgttcaacggccttcaagtctcgtacgtcgccaatttttgtgcgctgaagggcgaatcacgtgcagatgccgttcgccgaaacgctttcgcgctttaagcgtgggacttaggcagttgttcgcttcttgtggaaacgcattcgcgtccacgcaggcaaatccgcggcatcagctttcaatcggttcgagatccactgcctggtcgtcgtcgaacgcgtcacccgtggcaacggcggtgacgccttcgctcgcttgcagttcgaaggcgatttcggcactcgcatgcgccccgacggctttgagggcgtaccctccccggtcgagcgtgaagacgcggcttccgcgagccgttccttcgcagacggtatcaacgttcttctcatcgacgaatacgatcttgaagtcgccgtccgatacggtcgcatcgtagtcgacgcgaaactccccgccttcgttggggacggagatccgaagccatgtttccaggccggtcagtccgccgatctttctgtcgaacagggagccggttctgttcgcaactgtgtacgtgtcgaatccttgggcgatgcgggcatcgtcgcagtagatcgattcctgcatcagattgaggggtcctgcgcaaccggccagaaccagacacgccgccgcgaacgccgtcgccatgccgcgtttcctggtcatacggcacctcctttgccgggatctgccactgtctggcattctagcagctcgaaacgcgtcgggggggggggcactttttgccaagcggggcttcctgtggtacaaatggccgaatgggatgacggtggaagggacgggcggatgaccgggaagacgacgagcgcgcagcgcgatcgcgagcgggccgtgctggcggcggtcgagcggttcgcgccgctgcggcgcttgggctgggcgtttctgctggcctgggtgttctgcgtgttctacaccaacgcggtgagcggctacacgggcgcgaaggcctcgacgttggcggttggtgcgggctgggatctgttcttcacggggctgccggtgtccatgtcggtggtcatgctcgtgctcatcgtggtgttggagaagcggctgggctcgcccgcccagcatgcggcgctgttctggatcgcgccgctggccaccgcggtttccacgccgctgctgttctgtgagctgcccgatttcggcgcgacggctgcgctgttcgtgataggtgcggtgctcacgggatttggcagcggcttcatgtgggtgatgtggggcgagtactacgcgaaggtgacgcaggaggaagtggagtttctcgcgccgtcgtcggctgtggcggccgccgttctggtgctggtggtgtcggcgatgcagggatggatggcgctcgtggtggtgacggcgtttcccctgatgtcgggcttgtgcctgctgctgtcgtggcgggatgcgcaagggcgcgacgcgaccgccgagtaccggggcgccgccgagcagcgcgcgttcgccgaggctcacgacagcgcgcggaaggggctgccgcgcgtgctgaagtcgatggggcgcgccgggttcggcatcctcgcggcgtgcctgttcgtgtgcgtggaggggtcgttctggtcggggtcgtcagggcaggatgcgacggccgcccaggtggcgctcgtggtgagcatcgcgttcatgctgatggtgggtctttcggccacggcggggccgcgtcgggtgtcgctgtcgtttctgtaccgatggatgtgcccgacgctcgtggtgggcttcgcggcgttcatcgtgctgggggaaaccgcgggcgcgtacgtcgcctacgtggtggccatcgccgcgcgcttcgcgttctgcctgatcacgcagatgtatttcgcgcgctacgctgtgcagggcgcggccacgcccgtgcagtcgtacggtttgggatggatcttcgtgcacttgggcgatctgctgggcgtggtgacgctcgtgctggtggagtccggcatggcggccggggtgttctcgctcgaccaggtggcggtcgtgtccatcgcgctgctggtgggcgccaccatgttcgtgctcagcgacggccgcgcgttcgcgttcggcgcgcgcaacgaggatggcgtgctgcacgatgccgcttcgaagcggtcgatgccggcgggcgcggatgcgggcggcgcgaacgccgacgaagctgcatccgcgcccgcgcctgcagccgatatcgacgagctgaccgcccgcatcctcgagcttgccgaacgcggcggcctcaccccgcgcgagaccgaggtgttcgacctcctggcgcgcggccgatcgataccgtacgtgcgcgacgctctcgtcatctcgcgcgagacggccgccacccacgccaagcacgtctacgccaaactcgacgtgcactcccgccaagagctcatcgacctcgtgcattagctcgcacgttgccttgccgtcctgagcaagcgcatggaaagccccgcgtgcggggctttccgttaagggagggagggttggctcgggtggtgcttacgctgcgccgagggcgtgcttggcggcgatgcgggcgaaggtggcggtgcggcccgcgttgatgcccgtgaagttgctgggatagttgtgcgggtagaagccgccctggtcgttgccgcaaacgtagaggccctcgatgacgctgccgtccttgcgcagcggctgcgagtcggcgttcgtgatcacgccgtggatggtgaccaacagctcgccggcgatgcgcgcggcgtagaacggcggctcgtcgacggcgctcaggcggtaggcaggcttgccgaagtcgacgtcctcgcctgcagcgaccagttcgttatagcgttcgatggtggccttgaacgtggcggtctggtcggcgtcgaacttcatctccttcgccagctcgtcgagcgtgtcgcacttcttcagcgcgccgctctcgatgcgcggctccagccagaatgagtcgaggtgctccttcgtgatggcctcgcagtcgtacacgtcggcgttgaacgcggtgcccgacggcgcggggaacaggcgcgagcagccgcaggtgtcgaaccgctcgatgtcttcccagtagctgccgtcccaaacgatccacgagaagtggccgggctggttcgcgccgccggcgtagctcatggggtagcactggtcctcgttcatgaagcgctcgccgttcgcgttcacatggaggaacggctggctgccgggaaggaagatgtcgccgccctggtaggagccgtcgaactcggtatcgtcgaacatgatgccgcggttccagatcatgcaggcgccgcccgcttccagctcggctcccgcccacagcgccatgcggatgccgtcgccctcctcggtgacgctgtcgcgcagcacgcaccagttggagttgccggggcacaggtcctgcagcatctcgtcgttcgcgccgtagccgcccgtgcacacgatgacgccgttcttcgcgttgatttggatgacgcccttgtccttgctctcggcgatgacgccgcacactttgcccgactcgtcctgcacgagcatcttcgcgggcgtcatgagcatgacttcgccgcccagctcgcccagcacctcgttcatcacttcaaggtgggcgtacgcgccgtagttcgggccgtcggggttgtactcgcccatgcaggggttatagcacatggccgggtagtaggcgtgagggtcgtcgggcttgtgccattcgaacgggaacagcatgcccttgggctcaagcgtctccttcatccattcgatcatctcgccagacttctcggcccaggttttgtacagcagcatgttggcatcgcccgcttgggtctggttcgcatggtttagcagtgtggggacgtcttcgacatggtcgggctccagcgcggagttgagcgcgccgatagcctcgcgtgcggcggcgatgttgccgcccttttccagcacgatgaccttcgcgccgttctgcgcggccgtggtggcggccacgagcccgccgttgccggcgcctaccaccacgaggtcggcttccagcgtctcggcgatgtcggcgggcatctccggcttgtcgcgccaactgccctgagcgtcggcgtcggccttgccgctctttccgccttcggcctgcgcttgcggcgcgcatccggccagcgcccctgctgcggccagcgcgcccgtcgcggtgattcccgccaggaagttgcggcggctgatggttcgttctcccatgattccctcctcggtcgtttggtttcaacgaggtgcatgctacgcggggcgcggggccgcgtcatcgcgcggatccgggtatattcgtccatgtccaggcaaaacgacgaagatacccgaaaacgggggagggctgccgaacgcggtttacgaggtcgggcggcgcgtggcgccatgcgcgaggtgctatcatgatgcgttgcatgcgacgggcggggcgaaagggagtgcttcatggagcggacggacgagcgatacgggcggtacgtggccatcctcgaagaggagctcgtcgccgcgatgggatgcaccgagcccatcgccatcgcgctggcagccgcgcgggcgcgcgaactgctggacgcggagcctgctcgcgtggaggtgaaggccagcggcagcatcatcaagaacgcgaagagcgtggtggtgccccacaccggaggcctgaaggggatcgaggccgctgcggcggcgggcatcgtggcggggcgcgccgagcgcagcctcgaagtgatcgccgaggtttctcccgaggagattgcgggtatcgcggcctatgtggagcgcgcgcccatcgcggttgagcgcgccgcatcggagctggacttcgacatcgtcgtgcgtgtgttctcggacgcggaggcgcaggcggcggccgcggctgatgcctgcgcctctcccgctcgcagcgcgctcgtgcgcatcgccgacttccatacgaacatcgtgcgcgaggagcgcgacgtgaaggtgctgcgcgacgtggcggtgccctccgttggcggctcgggcgacgggatgaccgatcgcggcgtgctgtcgatggagggcatctgggacttcgccatgaccgtggagctggacgacgtgcgcgacctgctggatcgccagatcgcctgcaacggcgccatcgccgacgaggggctggcgggcgactggggcgcgaacatcggcagcgtcatgctgggcgcctacggcgacgacgtgaaggtgcgcgcgtgcgcgtgcgccgcggcggcgtccgacgcgcgcatgagcggctgcgagctgcccgtggtcatcaactccggcagcggcaatcagggcatcacggtgtcggttccgctcatcgtgtacgcgcgccacctgggctcttccgacgagcagctctaccgtgcgctcgtgctgtcgaacctcgtggctatccatcagaagacgggcatcggacggctgtcggcgttctgcggcgcagtgtgcgcgggcgcggctgcgggcgcgggcatcgcgtatttggatggcggcggctactgcgaggcctgtcatgccgtggtgaatgcgctgtctatcgtggccggcatggtgtgcgacggcgcgaagccatcgtgcgccggcaagatcgcgttctcggtgaacgcgggcatcctgggttacgtcatgtaccgtgacggccagcagttctacggcggcgacggcatcgtgaagaagggcgtcgagaacaccatcgacagcatcgcccgcctcggccgcgacggcatgcgcgccaccaacgacgagatcatcaggatcatgctgggagcgtgaatcgcgggacgagcgaagggaggtaatgaactgtcaaccccgtcccttcgtctcgtcactgggagtcaacgggaatgagtcaacgtctcgtctcgaaccggcgaacttcgctcgaattcctcgaacgtgggcgtgaatcgggagccatggcaattacgccctcgcctgaagccgcatatcgtcgtaggttcgaaatgcgaccaggccttttgcgtgtgcttccagcgagaagcgcgtttcgagcgcttgagaattgacatggctaccgatttgcgtccacccgggacgaggccggagcggccgaagcgaggggaagaggtgtcgaccccgtccgtcccctcggctcacctctgtttttcttcgtattcccagatcagcggcatcacccctgaggtttgatgcgcgttttcggaagattgcgctcggttcaaacctctgcggcgatgcggtgggcgtccttctcgatgcagcatcggcctaccgaatcgggatattcgggagaagcgagcaccatcacaacaaggagggcgtcatgtcgaatctttcacgcagaaatttcattaccggtggagctattgctgctttgggcgggacgctggcgatagcaggttgcgctccgaaaggcgaaagctcgtcgacggtcgcaggcgctgcgggcgagggtgcgcaggcatggaccggcacggccaacggcaagggcggcgagcttaccgtcgaggtcatcaccgagggcgattccatcgcccgcatcaacccgttgaagtcgcgcgagtcctacggcgtgggcaccgccggcatcgacgtgctttccgatctcatcgtgaagaaccagacgctcaacgtggatatggtgacgggcgccacggtttcgtccatggccttcctcacggccgtctccgacgccgtcgacgcctcgggcatgaaatcgagcgaatggaagaagcgcgaaaaggccgtgccgcaggctcccgagggcctgacgaccgatgtggatgtcgtcgtagtgggtgccggaggcgcgggctatgcggccgcgctgaccgcggccgaggccggcaagaacgtcgtgctgttggagaaactgggcatcgtcggcggcgataccatcctgtccggcggcgccatggccgtgccgaacaactggttccagaagcgggacggcatcgaggacagcgtggagaagatggccgaggacatgatcgtcggcggcgatcatgtgggcgaccccgatctggtcaacgtcatctgcgaaggcgcgtacggcgccatggagtggctcatcttcaacggaggcgtggcatggcagccctacgagcgcttcttcggcggccactcggtcatccgctcgctcatccccgaaggcaacgagggaagcggcatcatctgcaagctggacaagcgcgccgagggtctcaagaacctcaaggtgtgccgcaacacgaaggccgacgagctggttcaggacgcctcgggcgcggtcgtgggactgaaggccacgaacacggccacgggcgaaacctacgacttcaaggcgaaggccgtcatcctcgcggccggcggcttcggctccaacgtcgagatgcgcatgaagtacaaccccgagatggacgagaagatactctccaccgactcggtgggcgcgacgggcgactgccacgtcatggccgagaagatcggtgcgaacctcatcgacatgcagtacatccagacgtatcccacctgcgacacgcagacgggcgccctcttgtacgtgggcaacatgcgcctggagaatcgagccatctgcatcaacaaggaaggcgaccgcttcgtcgaggagatggagcgccgcgacgtcatctccaacgccatcaaggagcagacggacggcatcggctacatgatcttcaaccaggacggcctcgaccacaccgacatcgccacggtgaacgcggccgagatggacggcttgttcgggcgcggccagctggcgaagggcgagaccatcgccgaggcgtgcgaacctttcggcatcgatgccgctgagctgcaaaagaccgtggagaagtggaacggctactgcaaggacggcgccgaccccgacttcaactaccgcgcggcgctcaatcccatcgagggcggcccttactacatcttggcgtacaagccgtcggtgcactacaccatgggcggcctgcacatcaataccgacgcgcaggtgctcgatagcgacgccgcgcccatccccggcctgttcgcggccggcgagcaggcaggccataagatgggtacgaaccgcctgggctcttgctccatcaccgacgtgttcgtgttcggccgcgtggccggtgcgaacgcggcggcgctcgcataacgctcgccagccttgacgttcctccctctcccagaacccgttcgacggctttgcgcttcggacgggttcgccttgtgcgaacgcgttccatcggctagtatgtgccgcatgcgcagcaacgcttccatagcggacgatacgacgaaaaagacctcccggtcaggcggtgccgtgccgttccccaaacccaatcgcgcgatgctgttcgatagcgcggggctggcttgctacatcgcttggagcttcgtgttctggaacggatcggtgctgttcggcgacctgcgccatgaggcgcccgtgggcgaggcgcaaatcgtgcaggcggcgctgacggccttggccgcgctcgtgctcgtgctgctagcgcgcaggacggctcctcttaggcgacgcaccgtgctgttggcggtgttcgccgccgtgtcgagcctggccatcgtagttgccgcgcttgccggtttcgggcgggcgccgatgggctggatgctgatcgccttcgcgctgagcggcttgggaagcacgctgcgtctcggatgggaagagcgcatgagcgtgcagggcgtggagcgcaccgccgtgtgcgcagggacggcgtacttgctcggattcctcttgttcgccctgatctcgctgttgcccgccctgtcggtgctcgcggtctccgtgctgctgccgttcggcgcgttcgggctgctcgaaatcgcggtgcggggcgaacgggaacggggtgcatcggaggtgcggatgctgcccgcttctttggacggcgacagtctgcgcgtatcgttgtcgcgcgttccctggaagccgatggcggctatttcgctcgcgttcttcggctacggggcgacgcgggcgaacggcgtgatcggcggtttcgaggtgtcttccgagttccacggcgcgctggccggcgtgcctgcgcttgcgtcgttcgtcgctatcctgttggcgtacctcttttatcgcaagaacgccatgttggctttctacctggcgtttcctttgatggctatggcttcgctgctcccggcatcgcttgatcctttcgggggcggcactacgttcagtgtggcgctggtgggggcggagctggttaagtacctggtatggtttctgctcatcgattccttcttcaaggacggcctgtcggcgctgctgtgcctggcgcttatgcgattcgcccaatggggcggcagctgtctgggccagatcatgaccgatgtgctgcccacgtccgaatcggtggccatcgccatcttgctgtcgcttatggcggcgttgctggtcatcatgggatcgcctctgtctctcaaatcgcctgccgtcgtcgaagaggacgcggtcgacgcccttgccctccgcgtgaagcgcgtggccgtgcaatgcggcttatcgccgcgcgagcaggaggtgttggccatctgggcaaccggccacacgggcgcctacatcgagaaacagctgttcatctccaagaacaccgtgaagacccacctcaaccacatttatgcgaaaacgaagaccgctaaccgggaggagctgttggagctgctggagagtgtggacgccggatagctcgccccgaccgatcctcgctcgaaaaacacgcctcgttcgctgaggcgtgcttttcgagatcgtcaaatcggcgggtctgcgaaagccaccccagtcgcggctactcctgcgctgcgatttgctccaggaataggctgggctctatagtgcaggtgcggataccgttcttgaggcggatgcgactgatcttgagcttcagcttgccggcgctttcgaggtcggtggacgtgaagtacgacagcgccaccgcgcggccggcctttcctgtgagcgcgcgcacgcgtcgttcgtcgacggcgcgcatcttctcctggcgctcgggcggggtcaccgtggcgtcgaaatagtcgcgggaggggatgaaaccgttcacgaagccggcgacgatcagcaggtcgggcgagaagccgcaggcgaagtcgtaggggacgacggctaccgcgtcggcaacctccagcgtgggcgcgagcaggcgctcggccatgcgccgcgccatcgccgcagcatcggcatcgtaaaggctttccgggttttcatcggctgcgttgccgtgctcgaggcagagctcgcgcagaacggcgggcgcttgggattccgctccgtcggtgacgatgcgcgtcagctcgtccagcagtgccgtgccccgcaatcctcgtacctgctcgatgagcgcgcgaccgtccttgtaggcggtcgccacgcgttgcgcgcccactacgtgctcgcagtcgttttcgcttagcatctccaaagcgtccacgaggccgatactgcgctccttcgcgcaagtccgcaggctggcgaaagccgcgctgttcaccaggtagtcgccgaatccacaccagcaccgccaagccgcggtgtcgtctgggttcgccacgaggttgagggccgtggcgatgcgcgcaggcgtgcagcgggcgttgtcccgcacgtcgccgcgcaggggctgcgagatggcgagcgcttcggttggcacgcctcgtgcgtgcaaagcggttgcgatgttgcgcgaccacacgctgttcggtacggccacgacgatctgccgtgcgggcgttcctgcggcgacggcttcggccaccgtgcgcgccacctgttcgaactcggcttcgggcgtgtcgcttgccagagcgacccgttcgacggcatcgggcgcgtcggcatccaggtgctcgcaagcagcatcgggatgcgttgcgaggaattcgtcgattccggcggcataggggtacgaatcgtatgtctcgatgcaggtttccgcgtcgcccgccacggtgatcgagcaggttgcgacgagattcgccagcgtctgcgaggcacggcttgcgcaggcgtagtcgtccatcagcacgtgcgcgtaggaatgcgccgcccgcgcttcgtcgtgttctcggaggtagcgtgcagcaaggttcgccgcttcgggttctatgacggcgcgcatgaagaccaggttctctttcaacagcgtatggacatcggcctcctcgcccggtagcagccaatcgggatcgtcgtccgccagctcggtccacgagcggtagaagaacttgagcatctcgcgcagccgcttcggccgcagcccgctcaccttcatgtcctccatgaggaacgtctcttcgaaggcggtcagtagtcgcggctcgcgccccgaccagcggcgcgcgccgtcgtcggccagcacgtcgagcgctaaggcgcgtgcggtggcgacggttgcgccggcagcgcgcttggcaccgacgcgggctgtcaaccgctccgagaacaggcgtgcggcctggggcgtcgcgcacagcacgagcacgttgcccgcggcggcgttttcggccagcagcgcggcagcgcgctcgacgagacgttgcgttttgccggtgccgacgcctccggtgacgagcagggcctcggtcgattcgcttgtcgtttcgtatgccatgggttttcgtcctcccacgtcgtggttgtcagatgaaggccggaagcggcatccctcttttcgcagggagggggagcggggatgtcgctcccgggcaaaaggcggctcgtcccccaaagcccttgccaagccgccttttgcccggggtcgggctcggcccgattccggatgcgcgaccagaccgctgcagctgcgagccgggtcgcgcaggaggggctttacggaacggggcgcgcattctccgcgtcgatcttctcggcgttcgttggcacggcgacaggttctgcggtagacggcgttcgccgcggcagcagcggcatggtgatcgcgttcgcagggcatgcgtccacgcaggcgcggcacttggtgcactcgctccatgccgcctgcgaaagctgcgggtggcgcgggtcgatgccctcctcgcagacgcggccgcaggccccgcacgcgccgcccttcgccgtttccaggcacttcgcatcgtcgatcgtgggcacgaaggtcttgttcgccttcgcgatcaggctcatgaacgccgaaagcgggcacagcttatggcaccacttcttgaacagcagcacctcggcgataagcagcgcgggcaccacgatgagcgaccaggtgacatcgccgtgtgagaacaggttgatgaccagcaggatggtggcgaacgtgagtccgatggggcagacgaggcagaacaccgggaatccaaagatgaaggtggacgccagcgcgccgcccagcacgaagtggcgagcatcgagcgcggctccgcgcttggaggcgcaggacgcgcatccgctgccattcttcgaccccttcgagcatgaaacgcccagcgcgtcgatctcgactttcgtgagcggcgccgcggcaggatcggcatcgtcgccgcgttcgacgggttgcttcttcgcgaacaagccgcgcaacttctgcacgagcggcacggggcaaatccatccgcagaacgcgcgggcgaacagaacgatgagcagcaccatcacgatcagcgagattacggcgcgcggcaccatcatcttggaggcgagcatcgttcccaaggcgcccagcgggcataggatggagatgtcccagatgcccggtgccgacatggtgccgatcccgacgttcgtgacgaagccgacggcgacgacggccacgatggccagtgcgacgagggtgcgcagcttcttggagttcttcttcatgagggcaccttatccttcaacttcgtcaagcgggtggacgacgatggcgcgcgcggtggctccttcggagatggagccgttctgcagcgagacgcacacgctctcgcacgcgccgcagccgttgcacttgtcctcgatcacgacggggcggttgttctcgtcgagctccatggcctcgtagggacaggcgtcgtagcaaaaccggcatccgatcagcttgtacgccaagcaccagtccgtgttgataacggctttgccgatgatggtgttctcggccgtggcgtcgtcgggcagcttgagcgcttcggtggggcaggcgctcacgcacaacggggtgccgtcgtgctcttcggcgcaccagtcgcaccagttggccgagaagtcgaacgtgggggtgcgcatgttcagcacaccgtcctcgaggtgggcgggcgcgatgacgtcgcgcgggcagatctcgtagcacttctcgcagcggatgcaggccgagatgagccgttcctcgtcctggcctcccggcgggcgcacgagcggttgcgatcccgcgtacttcaatccgcctagacctagcatgaccgcagcgccgcctgcgcccaggcacagcgtgcgtcgcgtcatgccggcgtaggttttctcctgcttgttgtccatcgctccttctttcgatcctgtgcagttagtcttcggccagcacgtcgtcgaggaacgtttggtcggtttggaggaacccgtccgtcaagtacgccaagccccggtagaagtcggtttgcgcgaatcgcttcatgtcggaggtcatcatgggagcccatgccgccagatggtcttcgagaaagttcttctgcgtggtcagcagcgcgacggcctcgtcttcgtcgcctttgcgcagcgcttcgaccgtgcgcgtggccatgatctgctcgaattccagctcgagcgcgatatgatcctcgccctctttccatgtgtcctgcttgtcgaggcctgcgctgcggtagatggccagcacctcgtcgcgtgcttcctgcatgagcaggcgcttctcggaggtgtacaccgattcgaacgggtaggcggccgagaacgcgtcgatgccgtgtccgatgaacacgcgcacgtagtcgatggcgaggtcggtgacgctgttgtcccaggtgttgctcaggtacgtggccagcaggcggtagccctcgtccacgttctcgttgcccgtcttggcggggaagcgcatgctgcgcagctcgtcgagaaggggctggtccacctccacgcggtacaggcgcgacagcaggccgtacgtggcggcgcgctgctcgttcagtttgacgagctcctgcatggtcgcttcgtcggcgagggtctcggttgcgggcgcggttgcttcggtcatggttagtcctccttggatgcggcgggatcaggggttgcgggggtttcgggctgggtggcgggcgcgttctcgtctacgacgtctgccagcatatcgaggccggcgcgtccgatgtcggtgatgcaccacgccttcttccaggccagcgcgtcgcatttctccaggcggtcgacgaagtggggcgcgtagaagcgcggcttctgcaccagcgggttgtggtcgaccgcgttgttgatggcgggtgtcgtggcgccgccgtctgctgtgcacaagcggaggatgcgctggtagatgggcgcgtaggcggcatcttcgtccaggagggcgcgcaggcgctcgagcggtttgtcggcctcaagcgccgcgcggcccggctcggtgatgtgccagtagatctcgacgggttcgcgggcttccaggtattcgacgccgtcgacgacgacggtctgtggctcgatttcgatgtcctccgcgggttcgccctcggccgtgacgcgctcgatggcgcccgccttctccagcaaggagcacaggttggccgcgctgtacaccgagaagttgttctcctgcagctcgtcgacgcgagcgttcacggcggatgccggctgcggctcggcgcaggcggccaggatgcccagcagcaccgtgcggcgcggcgccatggcctccaacaagtcggcgatgcgctcttcagcgggcttttcgcagatggcgggcgtggcgggtgccatcgcgtcgtgagcgagcgcgtcttcggcggcgctcaccgtggcgacgaactcgtcggcacggccttcgacctcggtcgcatcgtcttcgaaatcttcaagtggatcgaacccgtcgtagtcgggctcaagagaaagatgctggttcgtggaatcgtgagtcatgttccgcccctcgtcagacattgtttgcacttacggcgcacagcaccgcgaaacctcacccctgaggttcccacttttgcaaacaatgtccgcttcgcacgcgatcagcgtgccggcggactccccaaggccacatgatagggaggcctgtcgaaggtgtcaagcgcgttttttctcgcgtgagacggcgaaagtggttatactgtgcggtgcaagggggtagacgagaaagggtgaagtcatggctcacgtgacgaatttcctcggtctgctcgaacaacttcagagcgccgacattacggttcatcagggtcgttgcgctattgtgcgcaatcgcaacgcaacgtgcatgaagtgcgccgacgtgtgcacgagcggttgcatctcctatgacgacaacgagctggtcatcgaacccgagcggtgcatcgggtgcggaacctgcgccaccgtgtgtcccacctgcgcgcttgaagcgcatcgtccgaacgatgccgagcttctgcaagcatgccgcgcggcggctgacgtggccgacggacaggtggttatcgcctgcgatcagctgcttgccgcggccgacgggttgtacgaccccgagaaggtggtgggcgtcacgtgcctggggcgcgtggaggagagcctgctggtcacgctggcggcgttgggcgtgcgccgcgtgagcctcgtgcaggcgcgctgcgcgcaatgcgagcatgtctcgggtttcgagatggcgcgggttgtgtgcgacacggcaagcgcgctgcttgcaacctggaacaacgatatgcgcatcgacctggcggaaaagcttccctcatccgtgcgccgggcgggcgacgagggctacgacgcgagccgtcggagcttcttctccagcatgaaggacgaggctaagaacgttgcggcggtgacggctgactacgccgtcaaggacgcattgggtgtggaggagcggcgggagccgaggttcgtgaaggtgggcaaggacggcacgctgcctcacttcattcccgaccgccgcgaacgtttgctggccgcgctcgattcgttggggcagccgcaggatgtgctcatggacacgcgcttgtggggccatgtgatcatcgatcccgagaagtgctcgtcgtgccagatgtgcgccacgttctgccccaccggggccatcgcgaagtacgcgggtgaggacggctcgatcggcgtgacgcatcgtccggtcgattgcgtgaagtgccgctgctgcaccgacatctgcccggaaggcgcgctcgagctgtccgacgaagtgttcgccgtcgatctgctgtcgggcgcgcaggagcgctatccgatgaagccgctcaagaacccgccgggcaacccgcaccagatctggcactccatgaaggatctgctcaactgcgaccaggtgtacgagcgctaaccctcgtgcgcgatgtcggggccgaagcgtcgggcttcttcctcgagagcgtcggggaagaagccgatggcgctggtgcgctcatcggctcggaacaacgcgtagtagggaaagcgcgcctcggcgtccgcgaaggggagcgcgcagcttccttccgactgcgccaaggcgacgcatctaagacttctctacgctcgacatcgcggacaacatcctggtggtggaggagcccatccggaagcggcagccgcagtcgggcgcccggctcggtacgcccttggatctctggcggccgcctcgcttacgcgacttcttcctctgagccctccaccaggtccatcagctcttgctgggtgtggatgtcgagctttttgtagatgtggcgcatatgggtgcgggcggtgccctcggagatgtagagctgctcctggatgtaggcggcgttgcggcctttcgccagcaggaacaggacttctgtttccttcttcgacaggaggtagcggttagccaccagctcgcacttgcgcttgaaccgcccggcgcgcgctttttcgggggactcggcgcgctcgcgcccgcggagcatctcgcctgccgggttgtccgattcacccacgatgagggcgcgcagctcgctgccgcgcggcagggcgccgaagccgaaaatgatgcatgcgaacacgatgatcagcgtgttcgccggattggttgcggagtcgagcgcggggatggcgaaggaggccgtcatcccgatgagcgcgcccagcgcgagtgccccgcgtccgaacccgaacaccacgaacgacgtcaggcggaaacgctgggtgatgtcggcgtagctcacccacatggtgccctcgaacaggaggtagcacagcagcagcgcgaacgtggtgaagggcgtcgcgtcggcgataaagtagaccgcgaccagcgcgatcgcgataaggggcagcagggggcggaacatgaagttgatgtgctggcgctgcgttagcatgacggcgatcatgagcgcgcacgccgtgagcgcggccgccccgatgcagacgacctgcgttcccaggccccctaccaagtgcatgtcggcgatggcttgcgtgcgcacggcgcccagcgcgaacccgaacagcaggctgggcgcgcacaggcgcagcgcgaacggggttttcctcaccttgagcgtgatggcggcgaactcgagcttgtcgacgagcgcggtgctgcaccggtagaggcaccagcactcgaggaacgggatgagggccgcggccagggctcccagcggatggagcaggtccaggttagacactgccgtgtacagcgcgatgcccgccaccagcgagagcgccgtactggtgacgatggtggcgatgtcgcattgcccgaacgacacgccgtagctcatcaggaggatggccgagccgatgccggtggtcgcacctcccgccgcgagcgcggcgatgcccgctgcgcttccgacgtccgccaagcacatgaacagcgtgccggcgaaaccgagcgtcgcgccgatgaaccgtaggcgtgcgcgtcggcgctgcgtggcgaacaaacggcggtatgcgcgcgatagcacgccgtaggacagcagcgtcatgacgaagaacacgagcgacacggggtggaagagcccggccggcaccgccggatcggccgcgttccagaagaacagctgctggccgttgaacatcgtgaggtagacccacgcccagtgggcgccgaagccgacgatgagcgctggcgacagctttcccagcgagaacccctcatcctcgcgcacctccactttgacccgcggaagcttgatttccatcaggtacccgctttcccctcgtctgcgaacccttgctgttcatcatactgcaccgtcatcgggttgctgctccgcgcctgccacctttcccctttgtcgatggctgtttcctggggttttgcgaaaaatcatagccacggtatgatgccccgccactccgtctcgacgcaaaatcatagcgctgctgggaggggatgcccgccttcgccgcttaggatggctccatcgtttcaggtatgaagcgagagacgagaaaggaaggtggggatcaatgactcagctcacgctcacgcgccgcagcttcatgaaggcgatggcggtcaccggtgccgctgcgtcgctcacggcggtcgccgagccgatgcgggcgcttgccgagggcgtcgatgccgatgcgggggaagtcaagcgcgttcgctcgtgctgccgcgcttgcggcaaggtggagtgcggcgtttgggtaaccgtgcgcgacggcaaggtcgtcaaggtggaaggcgacgagtccgcgccgcaaagccgcgggcactgctgctcgaagtcgcagtcatcgatgcaggcgctatatcatcccgaccgccttcgtttcccggtgaagcgcacgaaccctaagggcgaggacgatcccggttgggtgcgcatcacgctggacgaggcgttcgagatatgcggcgagaagctcaaggaagtgaaggagaagtacggcggggagtccatcttcgtgatgtgcggcacgtcgcgcgtgtggtcgctcgggccttaccagggcatgaagcagctgttcggcacgccgaacgcgcatttggcctaccaggtgtgcaaaggcccgcgccacttcggcggcatcatgaccgacgagatggggtccccgtggatggaggtggaggccgagcccagcgtgtacgtgcagtggggcacggcgtgcgagtactccaactacgactccacgaaccgcacggtcaccgacgtcgcgcatcgtgcgtctaagcatatcgtggtggatccgcgcgtcacgcctttgggcaaggaagccgacatctggctgccgcttcgtcccggcaccgacggcgcgctggcgctgtcgtggctcaactggatcatcgaaaacgaagcttacgatgacacgatggtgcgtcgctggtcgaacgcgtcgttcctctacgtggacgacaagcccgagctgacgcaaggctggttggtggagggcaacggcggcatcaacatgaagacgaagctgctgaccgaggccgacctcaaggaagatggcaagtaccagcgcttcatggtgtgggacgaggcgaacgagcgtctcacgtactgggatgccgagcttggcatgtgggagggcgaggagcaccgcatccccaccaccggcacatggatcgagcatccgtacaagccgcttgttgccgatgcatggctgcccgatcagtcgacgttcgccgatccggctaccgagcccgaccgcttccccgacggtttcgaggaatgcaatcccaaggggttgccgaagcgcccatctctgcttcctggtgaggtagaggtaacgctcaaagacggaaccgtgcacaaggctcgctctgtgtgggatgcgttccatcagatgaccagcgagtacaccatggagaaggcagaggagatcaccggcgtgccggcggcgaagagcgaggaggctgtacgcgcctggacgacgcgcgtcaatccgctgcatggcaacggcggcatccacttccagctggccaccgaccagaacggcaactccatccagaacgtgcgtgcgctgcagatcctgtcgtgcatcaccggcaactccgacgagccggccggcaaccgcggctcgtcgaaggcgcagttcgacggcaatccagggcgttcgaacatgcaggccggcgcgccgtacggcgacgaggccaagatgtgggacggccgcgacgtcgacctcgaagggctcgccgcgaagatgcaggatttcgtgcagtacctcatcgacaacgattcgcccctggccgagcgctacggcaacaaggtgcccagccatgaggaagccctcgttatcgccaagcgcatgggcggcgcattccgcacgtcgcaggcgtggccgaaccccaagaccgtgttcgagcgacaagccaacgaggttgacgccgagcgattccccctcaaccgctactgggcgcgctgggcggacgcgaactccatctgggacggctgcctggacaacgacgtgccgtaccagttgcatgcgggcgtgtgccagtcgggcgacttcatgaatatgggcaacatcgacgtggcgtgggaggccatgacgaagctggacttcttcaccgacatcaacctgtggttctgcccgaacaacggcaacgccgacgtcatctttccgtgctaccactggttggaagttgacacgacgcgcgtcagccagggcgccggcgggttcttcggctgcgggtgcgccgctgtcgaggcgccgggcgagtgcatctacgatcccgactggaacgtgggcatgtacaaggccatgggcgtgccatggaacacgaaggacgagtcggccgagccgtccgagatcctcaacttcggcgagaagaccgactaccgttggccgaaccgcagccgcgtgctcaaggacaacgtggacgcgtggaagacagccgagttccccgacggtcccacgtgggagcaagcgaaggagcacttccagaagaacggctggatggattgccgcacgtggcatcccgagcgttggggcacgtatcgccggcacgagatgggctggcgtcgccagcagggcggcttcaacctgttcccgttggtggacgaccatccgggcttcatgacgccgtcgggcctcattgaaatctggtcgcttgtgtgcgaggcgtacttaggcgacgaggacaagttccccgtgtaccgcgaacccacgaactcgccggtgaccacgcccgagtacttcgacgccgcgaaggttgccgacatcgatgagtcgaagctgcgcaatatggattatcccgccagcctgcaggagcacgccgatgcgacgttcctcatgaccacgggcgcgcgccagccggtgtacttccacagcgagcatcgccagctgccgtggtgccgcgagctgtggcccgcgccgcgcctggagatgaacccgaacgacgctgcgcgtctggggctcgagcagggcgactgggtgtggatcgagagcccgtggggcaaggtgcgcgaggtgctggacctgtactacggcatcagcaagggcgtagtgaacgcgaaccacgcgtggtggttccccgagatggacacggccagccacggctacgagctggtgaacatcaactgcgtgatggatccctacggccaggatgtggtgtgcggtgcagcaacgatgcgctcggttcccgtgctggtgtacaaggcgaccgaggagaactcgccgttcggcaacccggtgccgtgcgacccgcagggcaatccgtgcatctgcgacgcgagcgacccgcggttgaaggaatggatgggaacggggctacgttcccgcgttgaaggcgaagaagcgtgggccggagagggggcgtaaacgatgacgcagtactcaatcatcaccgatttgaaccggtgcgtcggctgccttgcctgcacggtcgcgtgcaaggcagcgaatggcgtgggcgtgggatcgttctggatcaagacgctgcgcgtggggccgaacccgatagagggcggcagcggagactggcctgacgttgagatgtacttcctgcccatccaatgccagcattgcgcggatcccgagtgcgtgaaggtgtgccccacgggcgcctcgcataaggcggccgacggcaccgtgcagatcgacaagtcgaagtgcatcggctgccagttctgcgcgatgagctgcccctacaacgttcgctacctcaacgaagaggagcgcgtggtggagaagtgcacgctgtgcgagcagaagatcgcccaaggcgagcttccgcagtgcgtggcgcaatgcggctcgcgtgcgcgcttcttcggcgacttggagcagggcgtggacgggttcgaggcaccggctccgcctcaagccttgtcgtgcgactacgccgaaatgcagcagacgcgcgtcacgctgaaggagtacgtcgaaccgtatacggaagacgagatccatcgtctgcccgatgttggaaatggcccggagctcatgtacctgctgcgctccgaccggaagtggagggggtagaccatggaactgcaatggcctttgatcgtgtttaccaccctggttgcctggtcggcggggctgttcgggacgcaggcgctgatggcggtgttcggcgtcgggaagaaggcgcaggtgccggcttgggtctgctcggccgtgctgctggcggccggcgggatcgcggtgttcttccatctcgagcactgggagcggatattcaacgggttcgggcacctgacgagcgggatcacccaggaattgatcgcgatcgtcgtgcttgccgtggtggctatcgtctacttggtgctcatgcgcaagtccgacgacggcgcgagcgtgccgaagtggctggcctgggtcgccgtcgcgctgtcggtggtgctggtcgccgtgatggcgcactcgtacacgatggccgcccgccccgcctgggactcggccctctggatcctctacgtcctcggcaacgcctgcgtgttgggccccgcgacgttcgccctcctctccgccttggctgcagggggaccccgggaccagcccgccgagcgcgcagccgacgccggggcccccgcgggtaggacgcccctggtaggcgcagccgccaacgccctcgcaaccctcgccttcgccgccttcctccagctctccgccggctccttcgccgacgtcggcctctacttcgacccgacgcaccccaccaaggccatggccgacgcagccgcgacggtcgcctcccaggccccgctcctgtggctgggcgccgtggccgtcggcgcgatcgtccccctggccgccgccttcctaggcaggcgcacggggaactggaagctctgggccccggcagccataatcgccgccctcgtcggagccgtctgcatgcgcgtcgtcttctacaacctggggctctcggtcttcatgttctactagcgcgtcccccgatagcgcccgcgggggcgccgccgaccaggcgagcccctccgcaggcgcaagagggggggagccccccccgcccctcctcgcccgtgcgcggcaacgcagaatgtttcacgtgaaacatcagcaacaaaagaacgaatgtttcacgtgaaacatcccaatttcccagtcctcttcgagcgcgattcgtctccccaaacccccttgcaaacgacgaatcgctctcgaagagggctggcggcctttccgtccccaggcaccccttcctgaaaaccggattcggcacccgtttctgcgactttttcggcttcgtggcaagcgccacgggaaagccaacttttggcaggttttgcacgatattcgtagtcatttgaggaatgctcggccaagccactctcggcacaaccctgcgagcaggcgaaacgcaaactgcttcgcggcggtgttccttagggctttcttttagcggtttgaaaccacgaatatcgtgcaaaacctgccagaaatcgggaaaactctggcgcaagggtcattcgcaggtcctttgcgggttgtctgaaggtcattcgctgagagacggtctgctggttgcttgcttaaagtagggctgcgcatatagtacaaaatgctaagcgcccgaacggtacgcagttgcctccctcgggcgttttttcatttgagggcgttatgctactcccgcccctcgatcacgtccaggaactcctgcttgctgtggacgtccatcttttggtagatgtggcgcaggtgggtggtcaccgtgccgcgcgacaggtagaggtcttcctggatgcgggtgctcgagcggcccttcgcgaacaggatcatgatctcggtttccttcggcgacagaccgtattccccggccacgtctttgcagcggtcttggaaacgctggcgcctcggctcggcgccgcccttgtcctcatcgcccttcgccagcgcgatgaggtcgttctcgttgaacacgaacatgtacgagatgaggatggccagcgtggccagcagcgcgatcaggctgaggctctgcggcgagaacggcgcgaacgtgcacacgaactgccccagcgaggaaccgagcagcacgccgagcgtcaccatgccccagccgatgccgaacaccatgacgcccgacagccggtacgtgaacgagatgtcggcgagcagtatccagatgagcacgttgaacgtgccgtagccggccagcgcgatggtgctctcgatctcggaaaagccggtgaacacgggcagcagcatgaagaacacggccatgaccagcatcaccgagcggtacacgggacgtaggcccgttttgctggagagcagcacgcagccgtagacgatggcgatggtgagcaggctcgaccaaaggagcgggaagcggtagaagttctcgacgctggcctcgttcgcggtgatgaacaccgcgcgcaccacgccgtcggccatgccgatgaggcaggcgcacacgccgatcttccacgagaacttccccaggtggatctcgaacggctgcacgaccggctcggctttcgacgaccacgtcctcagcttcacgaacagaatccaacctgacgcggcgggcagcagcgcgcagaccacgcacgctccgacgggcggcaaggtcagaacggcggggaagagggccgcggcgatcaggaaggcgagcggcgcttcgaacgacgtgcggcggggatcgacattgcggtacagctcgccgtaccccaggtcgatgagccccgatccggcgccggtcgataccgagccgaacgcgcacagcgccagcgccggtgcgctcggcagggtggcgcaggcgagggccagcgtgccgacggtggtgagggccgggccgaggaagcggaacgcgcgatggccgatgagcgccgtgaagcgccggtggaagatcgcgcttgcgaacagggtcgcgcacagcacgagcgtcgatcccaagtaagccgcgccgggcagcggctcgccgttccacgtgatggagctggtggcggcgcctaggaacatgaggtacacccacgcgcgcgccagggcgaagccgagcatgcgcaggttcaacaggctgcgcggcgccgtctcgcgcaggcgatcccgggcggtggtcagcggtttcggcatgtgcgtcacgagaattccccctcaagatctcgatcccctgagcctcattatagcgtgcgcgatccgtccggctcacgtggcccgataggttgatgcgtgacgtcatgctttgctcatcaggtgtttctccaaaatcatgggaaatgcatgatgggaaagcctccgattcgcccgattttttgcagaaacgcatgatgcgcggacgtcccctgccgcgcatgctcgaacaaagcggcgggcgttctcgacgagccgtcgcaaggacgagacggagaaggaggaggaatgggaaagctcaatctgacgcgccgtgcgttcacgaagctcacggccgtgacgggtgcggcgttggcctgcgcggcagcggtcgccccgaacgcggcgctggccgaagatgccggagcggccgcgcgcggcgacgacgtgaaacgcgtgcgcacgtgctgccgcggctgcggaaagatggagtgcggcgtgtgggtgaccgtgcaaaacggccgcgctatcaaggtggagggcgaccagtcgtcattccagtcgagcggcaactgctgcggcaagtcgcagtcgtccatccaggcggcgtaccaccccgaccgcatctaccatcccatgaagcgcacgaatcccaagggcgaggatcccggctggcagcgcatcacgtgggacgaggcgatggagatcgtcggcaccaagttcaacgagctgatggaccgctacggcggacagtgcatcttcaacatggcgggcacgtcgcgccagtgggtgtacgggccctacgcgttctacaagtggctgttcgacacgccgaacgcgcacgtggcgtcggaaatctgcaaggggccgcgccgtttgatggggtggatcagctcggtcgacggcgcgccgtggatggcgctgcgcgacgggccgcgcgtgtacgtgcagtgggggaccgcgcccgaaaactcgaactacgatgacagctgccgcaacctcgtggacaagatgaccgaggccgacgtgcacatctgcatcgatccgcgcctgtccggctcgggcaaggaggccgactactggctgaacctgcgtcccggctccgacggcgcgctggcgctgtgctggcagcacctcgtcatcaagaacgacctggtggactgggagttcgtgaagcgctggacgaactcgtcgttcctcgtggtggaggaccgggagcccacgggcggccgctacatcgacctgtccacgccgctcaacaacgccggcatccccgccgacgtcgtgggcacgaagctcaagacgcgcctgctgaaggaaagcgatgtggtggagggcggcagcccgcgcaagttctacgcgtggaacaaactggccaacgacggcgccggcggcttggtgatgtgggacgtcgacaccacgcaatgggagggctgcaaccacgtggcccccacgcgcgaccagatggaggtcgtgtacaagggcacgtcgcaggagggctatttgccgccgctgtcctatcacgagctggaggaagccggcatcgacctggatatgcgtgggacgcatgaggtggagctgctcgacggttcgaagcacacggcgaagccggtgtgggcgtacctcgaggaatcggtggcggactgcacgcccgcgtggtgctccgagatcacgggcctcgatcctgcgctcatcgaagaggcgtgcctcgtgtgggccacgcgtcccgaggggcaggattacggcaacggcggtatccacctgaacctcgcgcccgaccagatcggcaactgcacgcagacggtgcgcgcggtgctgcacctcatctacatgaccggcaacttcgacacgcccgccggcaaccgcggcctcacgcgctcgcccatcgacgagcaggccacggccgcgcccggctcgaacatgccgcaggaagtgaaggcccagctgatcgccttgggcgagatccccgtggaaggcgtcacgcccgatcccctcaacgtgcccgaccgctacgacacgctgtcgaacatggtgggcgccgacgagttccccatcacggcgtactacaacgagtgggccgacgcgacgcgcatctgggacgcctgcctcaccggcgagccgtaccccgtgcgcggcggcatcaacgagtccggctcgttcatgaacatgtcgaacgcgaacctggcctgggaggcgttgcagtcgctcgatttctgggtggacatcaacatgttccaccatcccggcaccgagatggccgacatcctgctgccgtgccagcattggctggagatcaacaacatccgcgtgtcgcagggcgcgtccggcggtatcggcgccaccatccgcgcggtcgagccgcccagcgacacgaagttcgactacgacatcaaccgcctgctgttcgacgccgtgggcggcccgaacggaacctggaccaacatcgcgggcgacgcgcccggcggctaccacgtggacgagcgcttggaggactggttccagaacaactcgaagaccaatcccaaggtgaaatggcagcattgggacgacttcgtggaggactttcaggagaacggctggatcaacgccaaggagatcgagcccgaccgctggggcacgtaccgccgcttcgagaccggctggatgcgcatcggcaaggacgcgtgcaccggctccacgttcagcgcggcgttcgacgacgccggcaatccggtgaacaacttcggctgccccacgccgacgggcctcgtggaattttggccgctcgtgttcgagacgtactgcgtggacaaggcgaacgagttcaaccccggcaagttcgacctggtgcacgagatgatgccgcactacgacgagccgaaatcgggccccaagggcgacgtggacatgaacgagtatcccattatcctcaccaccggccgccgcatacccgtgtacttccattccgagcaccggcagctgccgtggtgtcgcgagctgtggccggcaccgcgtttggaggtgaaccccgaagacgctgccgagctggggctcgagcagggcgattgggcctggatcgagacggagtggggcaaggtgcgccagtgcgtcgatttgtactacggcatcgcgaaggggtgggcgaacgccgagcacgcctggtggttccccgagctgcccgcgccgacgcacgggttcgagctgtcgaacatcgagtgcatctggaacccctacggccaggatccgttcatcgggtcgtcccacatgcgcggcgtgcccgtgaagatatacaaggccacgcccgagaactgccccgacggcaaggtcatcccctgcgcgcccgaggacggcaccgagatcatctacgatgcctccgacccgcgcctgaaggaatggctgccgaactacaccatccgagaggaggcgtaaagccatgacccagtacgcgatcgtcaccgatttgaaccggtgcgtcggctgcctggcctgcatggttgcctgcaaggcggtcaacaacgtgccggtgggcaactattggaacaaggtgctgcgcatcggcccctcgctgaaagagggggccacgtcgtcgcacgacgtggagatgtactacctgcccgtgcagtgccagcactgcgccgaccccgagtgcgtgaaggtgtgcccgacgggcgcctcgcacaaactggaggacggcacggtgcagatcgacaaggcgaagtgcatcggctgccagttctgcgcgatgtcgtgcccctacaacgtgcggtacctgaacgaggaagagggcgtcgtggagaagtgcacgctgtgcgcgcagatcgtggggcagggcgggttgccgcaatgcgtcatccagtgcggagggcgcgcccggttcttcggcgatctggaccaggggatcgagtcgttcgaagcccccgccgtcggctacgacaccgatcgcacctacgacggcctgtatgcaggcaaccgcgtgacgctgggcgagttggcgcaggacttcgatgcgagcaccgatctgcatcatctgccgaacgtcggcaacgatccgaacttcgcgttcatcctgcgcaaccgcgactggaagggtgatgaataatggaactccagtggcctttgattttgttcaccacgctggttgcgtggagcgcggggctgttcgggacgcaggcgctgatggcggtgttcggcgtcgggaagaaggcgcaggtgccggcgtgggttgcgtcggccgtcttgctggcggccggcgggatcgcggtgttcttccaccttgagcactgggagcggatcttcaacgggttcgggcatttgacgagcgggatcacgcaggagctgatcgcgatcgtggtgcttgccgtggccgccgtggcctacctcgtgctcatgcgcaagtccgacgacggcgcgagcgtgccgaagtggctggcgtggctgtccgtcgccttgtcggtcgtgctggtcgccgtcatggcgcactcgtacacgatggccgcccgccccgcttgggactcggccctctggatcctctacgtcctcggcaacgcctgcgtgttgggccccgcgacgttcgccctcctctccaccttggctgcagggggacccgcaggtcagcccgccgagcgcgcagccggcgccggggcccccgcgggtctcgcggccctcgccggcgccgccatcaacgccctcgcaaccctcgccttcgccgccttcctccagctctccgccggctccttcgccgacgtcggcctctacttcgacccgacgcaccccacgaaggccatggccgacgccgccgcgacggtcgcctcccaggccccgctcctgtggctgggagcggtcgccgtcggcgcgatcgtgccgctggccgccgcgttcatgggcaggcgcaccggcaactggaggctctgggccccggccgccataatcgccgccctcgtcggagccgtctgcatgcgcgtcgtcttctacaacctggggctctcggtcttcatgttctactagcgcgtcccccgggtcgcgcctgcggaggcccctccaacgaagcaagtccctccgcaggcgcacagggcggccccggccctcctcgagcgcgattcgtctccccatacccccttgcaaacgacggatcgctctcgaggagggctttgccaatgctttcattaacgatagatttgaattttgacaatcctcgatagccgttctatactatcgaaataaaaatctatcgttaatgaaagcattgacacatggaactgatcgatttctccctctatgagcgcggctggataaactacggaggctcggagcgcaaggaatccatccttgttcccaacggcgacggaaccttcagtgactacatgctcaaatttcgcaaacgcacgcctttcggcatgaggtacaaccacgtttccgaatacctcggctcgcatatcttcgagctgcttggattcgatgcccaaaagaccttcctcggcacattcgagggcgaggacgtggttgcctgcaagagcttcgtaggcgcgggcgaacagttcgtcccgttcaacgatgtgggcgagagcacgctcgaccaggataaggaacggtatcaatacgaatacgcggacatcatgcagatgcttcgcgacaattcgaagctcgtcgatgtatcggggacgatcgcaatgttctgggagatgttcgttgtcgatgcgctcctcggaaatttcgaccggcatggagccaactggggattcgtcaagcggaacggagcttattcgctcgcgccgaccttcgataacggctcgtgcctgttccccgcgcttgtcgacgaggacgagatggagcgcgtcatggaatcggaagacgagacggcgaagcgcgtatacgggttccccacttctcaaatccggttgcgcgggcggaaaagctcgtactacgacgtcgtgtccagcttggaattcgacgagtgtaatcgagccctgcgagaggtcatggagcgtatggatttggaagcggctcatcagctcgtgcgatccgttccgaacataagcgatcggcgcaaggagttttactgccatatgctcgatgcgcgctatcgggtcattctggaagccccctattcggacctggtgaggaggggcgcatgagggaatcgacgactacggggatgatcagcctcgatggtcccgggggcctggtatacgaggtgggggcgatcacgtacctggtgcgcgaggacgagtcgtttcgctatacgttcgttccgaattggccggtgatcgatttgctcgagcccccgcttttccagggggtgccggggtacgacctgtcgttgcgcaagacggaatacgtgcgcgagaacgtcaccccgacgttcgtgagcgagcgggcgccgtccgagagccgcgagggcttgtggcagctcctcgatgcatgcggcatggagtacctcgacaagatcgaatggctcatcaggacggatacgcgctacataggagatggcttgtacgttcggccatttgaagaacgcgaggtcggtgccgatgtcgacgtggccgacgcgatcgcgggcgccgcgaactccgagcaggctgcaagagcggtgctttcggcgctgtgccgaggcgatgccctctttctgaacggcgagcctattgccgacagcgagcgcaaggtgctgcacgacgtccttctatccatgtacgagaaggcgtatcgcgcgcgcgaggagaagcgcatctcgggcgtgcgcgcggctgccgagcggggcgcgtacaagggccgcaagcgcaagccgatggacgaacttgtgctgcgtgaggtggtttcgagctatgaagcgcgcgagctggatgccgaagaggcggcggctcggctcggcgtgagcgtctcgacgtttttccggagactgaaagagcttcggttgcaagggtaatggctgtgcagcatgctcatgccttcttctgctcgtcgatggtctgctcgaccagattgaggatctcctgctggttgtggacgtccatcttcgcatagatgttgcgaaggtgggtcttcgcggtggactgcgtgatgacgagcgtgtccgcgatatgctgcgcggtgcggccgcgtgccagcaatacgaggatctcctcctcgcgccccgtcagctggtactggtcggtgagcgcatggcacgcgttctgcagcttgttcgcgtggggaagcgcatcgtgaacgtcgggtgcgtcagggccgggccattgaccgcggattggcgtgtggtagtcggtgatgcttcccgaaagcgacgtgatggctccgcaggcgaacaatacgacaagcgcgatgaccgagctggacacgaatacgtcgggcgacatatgctccaatagaagagagctcgccgctttgcccgcggtgaacgagaggaacgcgacgcaccagggcatcaggtagggtcgtttgctttcgatgaggaagggggccagcatgataaagaggaacaccagcttctgcgtgatgttcagcaagacgaggtagaggaatatccacgtctcgttcacgaaggacgacagccacaaggcaagaagcacggtgggtatgaggaacaccttgtacagctcgaggctccgcctgttccagaagtactggacgagcacgaggatggccgctccgccgcatgcggtgcccacggccgtgcccagctggatgatgagcgataccgtcccgccgtcttgcaggggaatccattggtagtggatatgtccgaacaccacggcatagcaagccagcgacagcatcatcgtcacgacgaatactcgtcgaccgcgaggagcctggtccgaggggacgatgagggatcgatcggggcagccgattcccgccaccatgctccgctccgggctcgcgcaggcatcctcgctcgggatgtcgtcgcgatccgcacgcggcgcgcgcgaacgggcgtattccctgaaatagcagagcagcaccatcgacacgatggggagcagcgataccgtgccgtaagcggcatccaccttcagaaacgcgatgaggctgttcattgccgcaacgacgatcgttcccaggcccagcacggcggcgcaggcgcgcgccccgtagggaaagagcgctttcatccagagaaacaggatgacgccctctccaagcccgaatacgatgcgcgcgatggaggatacgatggggttgtcctcccatacgctttgctgcaagacgacgaacatggaagccgacatcaacgctcctgcgccgatgacgatcgcggcgggaacgtgggtgggcgcgtccagcttgcgatacgcaagagccagcatgatcaggagaaggaacgatacgagcgacgcgacggcgtggtagtcgccgctgatattgacggttctgatcgtcgagaggcggtcgccttcgatggcgagcagcgcgcatccgaagccgatcgaagcgatcgcgattcccggcacctcgcgaatcgccagcgcaagcggcgacgatcctcgttcgtctgtcatgcggacccccttttactcacatccccatggcgataaggctcgttcgagcattgtcgtcagtatagcaattcgccgataccgcggcggcgggcggatggcgaaataccactctcggtggtaggtctttcatgagctcgatagtagggtttctgacctggttgaacagagttcgcatcagcggtggggtgctcaactcgcgctcgatctgcatcatggttcgcacggacgcttggtccggcccgctcgttggagtgcgggtgaaaagggaaccggcagaggaggagctatggcgaacaccacgcaaaggcggtcgttcggcaccatgagccgtcgcagcttcatgaggctcgcaggggtgacgagcgctgcgcttgcgctgacgtcggcaacggcgccggcggcgcttgccgaagagcacgacagcggaacggttgcgtcgtcggacggcgtgcagcgtattcgcacgatgtgccgcgggtgcggcaagatggaatgcggcgtgtgggtgacggtggagaacggccgcgccatcaagatcgagggggacgagagctcgttcgcgtcgtcggggaacagctgcagcaagtcgcaggcttcgctgcaggcgtgctaccatcccgatcggctcgcgtatcccatgaaacgcacgaatcccaagggcgacgacgatccgggttgggtgcgcatcagctgggacgaggctctcgccgaagccggcacgaagctcaacgagatcaaggagcagcgcggcgggaactccatgttctcgatgtgcggcaccagccgcatctactgcatggcgagcgcgctcggcatgcagggcattctgaacacggcgaacacccatcaggcgtaccagatttgcaagggtccccgccatgtggccaccggtatggtgtcggctcgtgcgtacagctggatggccacggtcgaccggccgagcgtgttcgtgcaatggggcggcgcttcggagctgtccaactacgatgactcgtgtcgcacgacggtcgatgctgcggtcaaggcggacaagcacatcatcgtcgatccgcgtcagacgaacctcggcaaagaagccgacatatggaatccgctgcgtcccggcaccgacggcgcggtggggctcggctggctcaacgtgatcatggagaacaacctgtacgacgagctttgggtgaagcggtggacgaacggcccgttcctcgtgtgcgaggatatcgagccttccggttggcagcagatgggtgccggcggtccagaagaaatcaaaacgcgcctgctcaaggaatccgatgtgcaggaagacggcagtccgaaacggttcatggtctacgatcagttgaaccagcggcttacgtatttcgatgcggatacgggatactgggagggcgagcagccgcgtacgctgacggggaaggaggcgcggcaaaagcacctcgcacccggcgtgacgcaaggttgggtgcccgatcctaccgggttcgatccggagatcgatcctcagatattcgggcaggtggaagtcaccctgaaagacgcttcgacctcggtctgcaaaacggtgtggcaaacgttctcggactacgtagccgatttcacgcccgagaaagtggaggagatcaccagcgtttcggctgatgctttgcgcgaggcggccatcacctatgcgacgcctatcgatccatcgaccggatacggcaacggcggcatccagtacatgctggccatcgagcatgcgtgcaactcggtccagaacagccgtatctgcgatctcatcgtggggatcacggggaacttcgacacccccggcggcaatcgcggcgcaacggccgcgactttcgacgaagagttcgccatgatgggcagcggtctgcccatggcgtcggctgacttgtgggacaaggtgctgggcgtggaggacattcctttgctcaagcatcacggcatctgggccgattcgacggccatttgggatgcgtgcaacaacgaaggggcgccgtacccgttgtacggcggcgtctgccagtcgggcgatgtgatgaacatgtccaacgctctttggggttgggaaggcttgaagaagctggacttcctgctggacatcgacctgtggcatacgcccacgtcgcagctggcggatatcctgctgcctgcgcgccattggctcgaggtggattgccctcgccgctcccaagggtctggcggcatggagggaagccattgcaagtgcgtggagccgctcggcgagagctggttcgacgtggacatcatcatccagctgtgcaaggccatgggcattccctggagcgccgaccccgacgatccgtggccggactccatcaaggagcttgatgcggcatgcgagccgatgggtcttacctgggaggagtggaagcaggagtttcagaagaccggtttccgcgactgcaagaaggaataccccgacgactggggcacttaccgacgctacgaaacgggccactgccgctccgatggcaagccgggcttgcagacgcccacgctcaagcaggagatatggtcgaccatcatcgagacgtaccatcctgacggccggtacaaccttcccacgtattccgagcccccggagagtcccgttgcgcagcctgagcgggctcaggagtacccctacatcatgacgacgggccgtcgcattcccgtgtacttccactccgagcaccggcagctgccgtggtgccgcgagctgtggccggtgccgcgcgtagagatcaacccgaaggatgcgcttgagctcggcatagagcagggcgattgggtgtggatcgagacagagcgcggcaaggtgcgacaagtggcggatctctatcacggcatccgcccggggaccatcaactgcgagcatcagtggtggctgcccgagttccacggcgcgacgaagggtttcgacctcatcagcatcaactgcctggtgaacaaggacatgcgcgatcctctgtgcggatcttcgtacgcgcgcgcttacaacgtgaaggtgtacaaagccacgcccgagaactcgccgttcggcaatcccgtgccgtgcgacgtcgacgggaccgagatgatcacgtcgcccgatgacccgcgtttgaaggaatggctgccgaactacgaggggagggactaggctatgactcagtatgcgattgccaccgatctcaatcggtgcgtaggctgcctggcatgctcggtgacctgcaaagtggtgaacgacgttcctatcgggtcgtattggaacaaggtgctgcgcatcggcccgaatccgaagttcgaaggcgccgagttccccgatgtggagatgtacttcctcaccgtgcaatgccagcactgcgccgaccccgagtgcgtgaaggtgtgcccgaccggtgcctcgcacaagctggaggacggaaccgtgcagatcgacaagtccaagtgcatcggctgccagttctgcgccatgtcgtgcccgtacggggtgcggtatttgaacgaggaggagcgcgtggtggagaagtgcaccttgtgcgagcagaagattgcccagggcgagctgccgcagtgcgtcacgcaatgtggcggccgtgcgcgctatttcggtgatctggagcaagggatcgcaggtttcgagggcccggctcccatcgatatcgcttcaaggaacgtcgactacgatgcgaccgtccagagtcgcgcgaagttggtcgacgagatcgagtcgtatgccgaaagcgatgtgtatcgcctgccgaacgtggggaacaacccgagcttcgtgtacatcctgcgcaatcgtacgtggcaaggaggcggtgaataatggaactgcagtggcctttgattatctttaccaccctggttgcctggtcggcggggctgttcgggacgcaggcgctgatggcggtgttcggcgtcggcaagaaggcgcaggtgccggcttgggtttgctcggccgtcttgctcgcggccggcgggatcgcggtgttcttccacctggagcactgggagcggatcttcaacgggttcgggcacctgacgagcgggatcacgcaggagctgatcgcgatcgtcgtgctggcggtcgtcgcggtcgcgtatctcgtgctcatgcgcaagtccgacgacggcgcgagcgtgcccaagtggctggcgtggctgtccgtcgcgctgtcggtggcgctcgtggccgtcatggcgcactcgtacaccatggccgcgaggccggcgtgggactcggtcctctggatcctctacgtcctcggcaacgcctgcgtgttggggccggcgacgttcctcctcctctccgccttggctgcagggggacccggggaccagcccgccgagcgcgcagccggcgccggggcccccgcgggtctcgcggccctcgccggcgccgccctcaacgccctcgcggccctcgccttcgccgccttcctccagctctccgccggctccttcgccgacgtcggcctctacttcgacccgacgcaccccaccagggccatggccgacgccgcggccaccgtgggcgcgcaggccccgctcctgtggctgggagtggtggccgtcggcgcgatcgtccccctggccgccgccttcgtgggcaggcgcaccggcaactggaagctctgggccccggtcgccatcgccgccgccctcgtcggagccgtctgcatgcgcgtcgccttctacaacctggggctctcggtcttcatgttctactagcgcatcccccgatagcgcctgcgggggcgccgccgaccaggcgagcccctccgcaggcgcacgggggcggggcgctacgcccgcaggcgcacgggtcgggggcctcccctgcgcgcacgaccctccccggccctccaagagcgcggttcgccatccccacacccccttgcaaacggcgaaccgctctcccggagggcccggattcaggctttttcgtctcggcggtggcgcatgatgatttcgcgtgattcatcaagtgcttcaatgagcggcttgaggcgttcttcgttttcctgcttgtagatgcagtagatgatgaaatgcgcatcctcgtccgaaatggggatgcttacggtttggtttacatcttcgagaaatttgagttgccgaagattcttctgcaagatgagcacgccgccgtcaggagaggtagtcgcatagcttgtcacggcacgccctagtttgggacgtttttttggctcgaatccgtgttcgtggcatatctgctcgatccgtctccatcccgaaacggagtattcatcgatgaactggataaacgtctcgtcagctagttcgtctatgctgatttccgagcgatcagcaagtggatggtcgcgatcaacgacggcaacaaatggcgtttgaacaagcgggcggaaaaccagccctcgctcttcgagcgcatgagcctcgtcgtacgcgaacaccatatccacctcgtctcgatccaactgatcgaacagaggtcgatcctgatggtgctcaaacagaatgggtacatggtgctggtcattgagcagcacggtggacagcgagatgatgctcgacaccgtgttgtcgtagagtatcccgtctacccggatgggccgttctttcacgaccgtggctatggctgcttgggccctgtcgtatgcatcgaccatctccatcgcgcatccgaacagaatacgtcctgcttcgctcagttgcacggttcttcggtcgcggatgaataactcggcgtcgaactcgcgttccaacgcaacgatatgcttgctcagcgcaggctgggtcatatgcagcttctcagctgcttcggtgtagttgaggcagcgcgccaaaacgatgaactcgcgatagaagtcgatgttcataggatccccttccgcccgttagagcgttccccgcttcatggtatcacgtcgacggcgtccgcgcgtttccggattgtctgtggtagaaaacggaataacgatatgcaccttcatctcggttggcctgcgacgttcgttttcattatttccatatgctttggctgctcgccatactcaggtttaaggaaagccttgagagaaggagggtgtatggggaagacgaccgtgacaaggcgcgcgttcgctcagcttgccgccgcgacaggcgcaatagccgctatgggtgttggaactcgtcctgcggtggcgcttaccgatggcaattcggggacggcgggcgagcgggggatcaagaagatacgctcgtgctgccgcggctgcggaaaggtcgaatgcggtgtgtgggtgtacatccaagatggcaaagtggttcgaaccgaaggtgacgaaacctgcttcaacactatgggcaatcattgcagcaaggggcaagcgtccattcaggctgcatatcatcctgatcgtatcaagttcccaatgaagcgcacgaacccgaagggcagcgaagatccaggttgggtgaggatcagctgggacgaggcctaccggaccattgcggacaatattatgcagttgcgtgagaagtacggtcctgaaagcttgttcacgtggtgcggtacgggccgacagtggtgcatgcagtccgatgctggcatggcgcttgagctgttcggtacgccgaacatcatcgcggcgtaccaagtgtgcaagggtccgcgccatttttcgtcgcgtctcgacaacgttcaggcgtggtcttggagtgaggtgataaaccattcgacgaaatacgtccaatgggctaccgatccctccgtttcgaattacgacgattcgtctcgtttggtaattgatgtggcgcgcgaagctgaggcttttatcgtggttgaccctcgcctgtcgaatcttggccgcactgcgaagtattggttaaacttgcgacctggcaccgataatgccatggcgctaggatggtgccatatcatattgaagcacgatctggtggattggcagttcgtgaaacgctggtccaatgcctcgttcatcgtcgtgcccgatatggacccttcgggctacaccgaggcggttcaaaacacgaaaagcccctacgaatatcgtacgcgtttgctgaccgaagccgacatagatccttctatggttgactgggagattgaaggcgaggggaatccaaaacgttatcttgtgtacgatcagatcaatcggcgctggacatattggcaagccgatcccgaagacgcgcattgggaaggcgagacctggacaaaacaaacctctggattcacgcaagacgtttcgcgtcttcgcgacgacgaatcgaaggtggctggctggatcgcggatctgtcggaattcgatccgcgtatcgatccggcgctcaccggggaattcgaagtaaggcttaaggacggaagtacgcatatcggccgtcctgcatgggatttgtgggctgagtacctgcaacaattcactcccgaacgagtgtcggagatcacgggcgtggatgcccagcttatcgaagacgccgtggttgaatgggcaacgcgcgatgacccgcgcatacccaacggcggtataaattacggtctgggcgtggagcatgcgggcaactcaacgcagaattgcagggccattatggcggcttgcgcaatggtaggcgccatcgacacgccgggcggccagcgcggtgcgacgaacggatggaccgaacagtcgggtccgtgcgccatgcttccgtcgatggcggcattcgcgttcatgcccacgcccgacttgtcgctcaagatggccggaaatgagaagatgccgcttctatactggtacggtgtgtggtgcgatgccaatgccgccatggaatgcgcgcacaaggagccggatgcgccctatgagattcatggtggcatgatcggctcgggcgaccatatgaacatgggcaacgcaacgtacaattgggaagcgctcaacatgctcgactttctgttcgaggcgaatctgtggcattcccctacttcaggtgcggccgacatcctccttccggtctgccattggaccgagatcaacgcgtatcgcattgcccaaggggcatccggtgggtttggcctatgcgtgaaagctgttgatcctcctggcgaatgcaaaagcgatccgttgtacttcatggagctgtcgaagtatttcggcgtcccagcgtttgacggcgacgatccgtggctcgagaacaaacctgatgccgatctcgaaatcgaaaacctcacgattcagtgctgtgtccaaggatgcgcgccatacaacaattggaacgagttggaggctgcattccaagagcacggttggtggaacatgaaacgcgagatcccggaagactggggcacgtaccgtcgatacgaggtggggcaggcgtatcggttggctccccatcagcaaccggctcagctgaacatcaataaaccggggttccccacacctacgatgaaacatgagttttggtgcacttccatcgaatcgttcttcccggagggggcggatggccctgagcttgcacccgggttcacttccgaagcgctgccttattatgcagagcccgcacacggccctgtggtcgatgcggaaacgtacaaggagtatcccattacctgcatcactggacgacgcataccggtgtacttccactccgagcaccgacagctgccctggtgtcgcgagctttggccggtgcctcgcatggagatcaatcccgatacggctgctgaacttggactcgaacaaggagattgggcctggatcgagagcccttggggcaaggtgcgacagacggtcgatctctattacggcattaagccgaacatgatcaacgccgagcatcaatggtggtatccggagttggctcaagcggacaaaggatatgagttgtcatgcatcaattgcattaccgatcggaagactcaggataaatacaatggatcgtcgaatgtgcgcacctatccagtgaaggtgtacaaagccacgcctgagaattccccctttgggaatcctatcccttgcggaaacgatgggactgagatcattcatgactcttctgatcctcgcctcaagctatgggaaatcggcgctgctggcatccatccggatcacttcgagtaggagagggggaattatgacgcagtacgctatcgtcaccgatctcgatcgttgcgtaggttgtcttgcctgttcggttgcctgcaaggtagtcaacggcgttccgacgggctcgttttggaacaagacattgcgcattggcccgaatcctcgagaaggcggcagtgggcaatggcccgatgtggagctgtattttctcaatgtgcagtgccagcactgcgagaaccccgaatgcgtgaaggtgtgcccgacgggcgcctcgcacaagaccgaggacggcaccgtgcagatcgacaagtcgaagtgcatcggctgccagttctgcgcgatgtcgtgcccgtacggggtgcgctacctcaacgaggaggagcgcgtcgtggagaagtgcaccttgtgcgagcagaagatcgctcagggcgaacttcctcagtgcgtgagtcaatgctgcggtatggcacgctggttcggcgatgcggacgaaggtatcgaaggtttcgtcgggcctcgcggcgagatactgggcgagtatatatcgccattctcggatgatcaggtgtatagcctgccggatgtgggcaataagccgtcgctcaggtacatcttgcgcgatatgaaatggcaaggaggcggtgaatgatggaactgcaatggcctttgattttgttcaccacgctggtggcgtggagcgcggggctgttcgggacgcaggcgctgatggcggtgttcggggtggggaagaaggcgcaggtgccggcgtgggttgcgtcggccgtcttgctggcggccggcgggatcgcggtgttcttccacctggagcattgggagcggatcttcaacgggttcgggcacctgacctccgggatcacgcaggagctcatcgcgatcgtggtcttggcggtggtcgccgtggcctacctcgtgctcatgcgcaagtccgacgacggcgccagcgtgccgaagtggctggcgtggctgtccgtcgcgctgtcggtggtgctcgtggccgtcatggcgcacagctacacgatggccgcccgacctgcctgggactcggtgctctggatcctctacgtccttggcaacgcctgcgtgttggggccggcgacgttcctcctcctctccgccttggctgcagggggacccggggaccaacccgccgagcgcgcagccggcgccggggcccccgcgggtctcgcggccctcgccggcgcagccgccaacgccctcgcaaccctcgccttcgcgatcttcctccagctctccgccggctccttcgctgacgtcggcctctacttcgacccgacgcacccgacgaaggccatggccgacgccgcggccaccgtgggcgcgcaagccccgctcctgtggctcggcgcggtcgccgtcggcgcgatcgtccccctggccgccgcgttcatgggcaggcgcaccggcaactggaggctctgggctccggtcgccatcgtcgccgccctggcgggcgccgtctgcatgcgcgtcgtcttctacaacctggggctctcggtcttcatgttctactagcgcatccccgggtcggggggggggggggggggggggggggggggggggggggggggcacgggggcggggcgctacgcccgcaggcccacagggtcgggggcccgcctccgcagatgcaccgtaggagccccccataggcgcccggccccaggcccccgtgcgcgcgaccctccccggctctccaagagcgcggtttgccatccccatacccccttgcaaacggcgaaccgctctcccggagggccggggtcgtatcagttgatttcttgcacgagattgatcaactcttgctgggagtgaatccccagcttttggtagatgtgctggcgatgggtggaaaccgtgctcttcgacaggcatagctggtcttgcacgtacggcaggttgcgtcccttcgcgaacatgatgagaatctcggtttcgcgttcggtcagaccgtaccgatcgaccaccttcaggcatttttcctggaagcggcgcttgcgttcaagcggaatgatgtccatcgctttcagcagatccgattcggtgaacacggcgctgctcaccagcagaatgaccaaagccgaaaccagcatgatgggaaaagctgaagcaagctggatgccgtgctggtgaagcacgaaccggcccagcagcatgcccagcagcggtccgaccgcccatgcggcacgcgcgaatgaaaacgtgcgtatcctgaccgacgcgtatcgattgcatatgcccgtcacgatgacccacataaacaagctgaagcattggtaggcggccgcattcgcggcgtagggaaggtaggccgacgaatcggggtatacgagaggcagcggcagcagaagcgcgccgatgacgaggaacacgacgatcgcgtggtagcagtttttcgccatgcgctcggatcttgagttgagaaggatgagcgcgatggcaatcgctccggcggtcactccgaatgcgacaagggcctgggtgaacgcgtagacggtgccgccgacgctcgcgatgcccatctgtatgtagagggttcggacggcctcgttcgcgaatcccaccaaaagggcgcacagcccgagcctcgtgacgaggtgggcccagtcgcgtcgctcgagcgggtcttcgatgggcgtctgctggtcgagcgggcatggcgcctcctgcggcgccaacccgatgttcttcatgccgaactcgagcaatacggctgcgatcaggggcatgctggcggcaaacacgcatgcctcgaaaggcgagaacagcaagaacagggcgaaaagaagcgtcgacaggatgtgggccgatgcggcgcccgtcacgatggcgcgcatgggcaggaggctgaagctcatgccgaatctgatgaggaacagtcccgaaaacacgcccgacaaaacgcctgccaagctcacgaacgcggtgcccgcgattccctcgaaccccgcaagcggcataagcagcgtggacgcgcacacgccgaaagggagcaggtaaagcgacagcttggatttcaagaaacgccccgtagccctgtcggctatgccggcaagcgcaagcgtcaacgtgacggcgatgatggatatcaggtaggtggtatcgagcaggctttcgccgtgatggtagcttgcgaacaggctcatgctcttgaagctcatcgacacccaggcgatgttgcagcccagtgctgcccctacggtgatttctgcagctgttgggaagaccctttttggattgaccggctccatggacttgtccccatccccccgaatgcgggctttccgccgtccgcaagcgaacggctccgagatgcctattgtaccgcgctctcgtgccggtcgagttccgattgcgacaaaaagactgggagatttggaaacgcgatcagcgtttctccaggtgaacggccatcgtgcgatgcgcacgataccgatttgatcgaaaacgtgcgaccaggccgatgtgcgacggcgacgggatccatagggtgaagcgcatcggagaggacgatgaaaggaggaggaatgggcgaactgctcatgacccgacgtgcgtttgcgaaggtgatggccgtgacggctgcggccgccggtttcacgggggctcagccggcgttggcggataccgagccggctgcctcgtcgggcgaagtcaagcgcatacgctcggcctgtcgcggatgcggcaagatggagtgcggcgtttgggtgaccgttcaggatgggcgggttgtcaaaacggagggcgatgaaagcgctttccagtcggcgggaaaccattgcgcgaaagggcaggcgtccttgcaggcggcgtatcatcccgaccgtctcatgtacccgctcaagcgcacgaatcccaaagggcaagagcccggttgggtgcgcatcagctgggatgaggcgtatcgatccaccgtcgaggcaatccataagaaccaggaaaagtacggcaacgagacgtgcttcttcatgggcggcacgtcgcgtatctgggccatgggcccttatggcgcgctgaagcagtgcttcgggtcgccgaacggcatacaggccaacgagatatgcaaaggcccgcgcttctacgctacgaagctgaacgattcgaacgcttacagctggatggaagtggtggggcgtccgcgcgtgtacgtgcaatggggcggcgcgtcggagctgtccaattacgacgatagctgtcgcaccacggtcgacgtggcgacgcgcgccgacaagcacatcctggttgatccgcgccagacgaacttggggaaagaggcggatatctgggtgaaccttcgtcccggaaccgatggggcagtggcgaactgctgggccaacgtgatcatcgagaacgagctgtacgacgatttgtacgtgcggaagtggatgaacgctcccatgttggtggtggaagaggagagcttcgagccaaccccttcctcgtcgagcgcgcagacggccaaggtgcgtacgcgccttctcaaagagtccgacctcgtcgagggcggggcggatacccgcttcatggtgctcaacgagatcacaaacgagctgagctggtacgatgccggcggcgacaaccctggctgggagggcgaggactgggttcccgcaaccgagggcaaagaggctcatcagccgggattggatctgacaggtcagacgcagggcttcgtgcttgactacgtaccgtttcccgacgggctgcttcccgcgctgcatacccccgaaggcggcttcgaggtggagttgaaagacggctccagcgtgcacgtgcgcacggtgtgggagcgctatatcgagttcttggaagactacactcccgaaaaggtgtcggagatatcgggcgttgacgtcgaagtgctgaaagaggcggccatcacgtacgcaacgcgcgtcgacccttcgaccgggtacggcaatggcggaatccagtacatgctggcgctggagcacgcgtgcaattcgacgcagaacaaccgtgcctgcgacctgctggcgggcataacgggcaacatggacactccgggcggcatgcgcggctcgactcccggttggcccgtctacgacctcggcatgtgcgtgcccgactccggcaaaaccaccgagtacaccatcgagaagattttgggcaaagagcgttttccgatgatcggctcggactgcaaccccagctgggcggatgcgacgtcggtgtacgacgctatcgagagcggcgagccttataacgtgacgtgcggcatcgggcagacgggcgacttcatgaaccagtcgaactccctctttgccgcggagcagcttcagaagctcgacttctggtgctcgatcgatctgtggcacaccccgtgcgtggatatgatggccgatatcgcaatgcccgccgctcattggctggagctcgattgcattcgcaaaagccagggctcgtcgggtgcgttcggcgctacggtgaaggcggtggagcctcccggagaagcgaagaacgatctggagatcgtggttggcctgtataaggccgccggggtcccgtacttcgacgaggagtatcacggtgcggcatggctcgagggggatgaagctgtggacgcgtgcaacaacgttgcgctcaaaagctttcgcattcccgattggaatgactacaagaaggaatttcaagagaagggctggttcgattccaaggtggagaagcccgacgattggggcgtctatcggcgctatcaaaccggaaacggccacatcaacggagggttcccgcccaatccgaaccagcatcaaggctggaacacgaccacgcacaagcaggagatctggtcgacggtgctggaatcatggctgcccggcgagggcgaggagttcccgaagttcgtggaggctccgcatggccccgtcgccgaccccgatttgttcacggacgacaactcgttcttgatgaccaccgggcgtcgtcaaggaacctacttccattccgagcaccggcagctgccatggtgccgcgagctgtggcccgttcctcggcttgagatgaatcccgttgacgccgagcgacttggtctcgagcagggggattgggtatggatcgaaaccgatcagcacaagattcgcgaagtggtcgatctgtactacggcatcgccccgggtgtggtgaacgccgagcaccaatggtggtaccccgagctcaatcagcccgatcacgggttcaaattgtccggcgtgaactgtttgatcgatcgccatgcccaagatcgcatcatcgggtcgtcgaacctgcgtgcttacggtgtgaaggtgtacaaggccacgcccgagaattcgccgttcggcaaccccgtgccgtgcggagacgacgggacgcccatcatccacacctgcgacgatccgcgcctgaaggaatggcaaccgttgtacgaggggagggagtgacctatggctcgttatgcgattctgaccgatctcaacaaatgcgtcggctgccttgcgtgctcgatagcgtgcaaggtggtgaacagcgtgccggtggggtcgtattggaacaaggtcttgcgcatcggaccgaacccgcgcaccaagggcggccaatggcccgacgtgtacacctatttcctcaccgtgcagtgccaacactgcgagaatcccgagtgcgtgaaggtgtgcccgaccggcgcctctcacaagctggaggacggcaccgtgcagatcgacaagtcgaagtgcatcggctgccagttctgcgcgatgtcgtgcccgtacagcgttcgctacttgaacgaggaggagggcgtcgtggagaagtgcacgctgtgcgagcagaagatcgcccagggcgagctgccgcaatgcgtgagcgaatgcggcggtcgcgctcggttcttcggcgatttggaccaggggctcgagagctttgaggcgccggggtgcgatctgcaggacccgtcgtacgatgcgcaggcgaaggccaggatgaagtggggcgatttgataggcgactcatgcgactatccggtgaagccttacgacgagaacgaagtgtaccaccttcccgacgtgggcaacgcccccagcttcgtctacatcctgcgaaacgagaagtggcaaggaggcggtgaatgatggaactccaatggcctttgattttgttcaccacgctggtggcgtggagcgcggggctgttcgggacgcaggctctgatggcggtgttcggggtggggaagcgggcgcaggtcccggcttgggttgcgtcggcggtgctgctcgcggccggcgggatcgcggtgttcttccacctggagcactgggagcggatcttcaacgggttcgggcacctgacgagcgggatcacgcaggaattgatcgcgatcgtggtgctggcggtcgtcgcggtcgcgtatctcgtgctcatgcgcaagtccgacgacggcgcgagcgtgccgaagtggctggcctgggtcgccgtcgccttgtcggtggtgctcgtggccgtcatggcgcactcgtacacgatggccgcgaggccggcgtgggactcggtgctctggatcctctacgtcctcggcaacgcctgcgtcctgggccccgcgactttcctcctggtcttggctgcagggggacccggggaccagcccgccgatcgcgcagccgacgccggggcccccgcaggtaggacggccctcgccggcgccgccctcaacgccctcgcggccctcgccttcgcgatcttcctccagctctccgccggctccttcgccgacgtcggcctctacttcgacccgacgcacccgacgaaggccatggccgacgccgccgcgacggtcgcctcccaggccccgctgctatggctcggcgccgtggccgtcggcgcgttcgtgccgctggccgccgcgttcatgggcaggcgcacggggagctggaagctctgggccccggcagccataatcgccgccctcgtcggagccgtctgcatgcgcgtcgtcttctacaacctggggctctcggtcttcatgttctactagcgcgtcccccgatagcgcccgcgggggcgccgccgaccaggcgagcccctccgcaggcgcaagaggggggggagcccccccccgcccctcctcgcccgtgcgcggcaacgcagaatgtttcacgtgaaacatcggcaacaaaagaacgaatgtttcacgtgaaacatcccaatttcccggccctcctcgagcgcgattcgtctccccacacccccttgcaaacgacggatcgccctcgaggagggccggggccgggctcccgagcgggttccggcgcctcttctgcgactttttcgacttcgtggcaagcgggctcccgaagccggttctcccatcaggcgtttcgcaagcgcgagaaagcgcgccggcggaagccggcggccacgtgcgggagaaacccctggtcggctttctccccgcttgccacgaagtcgaaaaagttgcagaaagcagaccaaaccttgcaacgagtcgcccgccgtcctcatgagcgtcctcatgagcgacaggcctcaattccggcagaacctatccctccacgccgctttctcgctctagcaggtcgatcagctcttgttgggagtggacgtcggttttgcggtagatgctcttcacgtggctcttcaccgtctcgtcgccgatgaccagctcctcgcggatgtaggcgcggttgcgccccttcgccagcaggaagaacacctcgatctcgcgcggcgacaagcggcagctgcgcgccaggcgcgtgcccgccttctcgaggtcggacgtggcgtcggcctcctccatcggtttcacgaacccccagcccgtgttcgccgacccgctccccatcgcgaacagcgcgatgatgaggatcacgaacacgatgcccgccgacagcatggccagcccgaggtcgccgtgcaccacggtgagcgcgagggcggccgcgaccgagcccacgaactgccccagctggatgcacagcaggccccagcccaccacccagccggtcggcacgccgccgcgcgaggccagcacgggccacagcgcccacagcacgatgtagaagtactggtagccgaactggtgcacggcggtgccgatgacgttccacggctcgtgcagcggcaggaacaggaaccccgccgccatgagcggcagcgcgatctggtacgtcaggtggtcgaagtccatcttgtacacgctcatcgtgacgaacacggccagcgcgccgcctgcgatggcgatgatgttcagctggtcgcgcacgccgatccaatcgtcgcccaccggggcgatgagccccttcatggcgccgaacgacacgccgaagaacacggcgatcaccatcatgcgcaccggcggcttctcgcgcacgcgcacgttgcgcatcgcgcgcggcggacgcggcacgctgcgcttgaagtggacgaagcatcccatgctgacgagggggagcagcgccaccacgagctgcgccacgtcgatggggagcaaccgcacgagcaggtacgccaccgcggcgatgagcagcgacaccacgctgtagttcacggtgcgctgcgaccccagcgacgccagcagctcggcccacagcaccacgacgatgccgctgcccacgccggtcagcaacgatccggccagatagagggtcgatgcgccgtcacccgtcccggcaagcgcggggtgggagatggcgacggtgcccagcgcggtgagcacggcggccagcggaggaaggcccttcacgtcggacaacgggttgcgcaggtaggagagcggcagcaaaaacgcgatggtcaccacgttcgccagcagcgacgtcacccacagcggctcgagcgcgatccccgcaagccccgtcgccgcgcccgcaccgaccgacgagccgagcagcgttccctcgccgtagaacagcgagctccagaacacgcaccagatccaggtccaatgggccgcgaaccccaacaggtcgggcgtgcgccacagctccttgcgcaacgatggtgtcatccgttcctccccttgcatgcatcgaacgcccgcagtgcccgcagcgcgcggatgggcgaatccgacagcgatccccgccagagattatacgcgagcgcatcaccctttgccgcgccgcccgtgtgaaaagcatcccccaggtagggggaaatccgggaggggaggcgaagttcccccggtcgacgggatgatgacctgcgaggtcgggcgtatggtcggcgcaacgcggcaacaaggggccgcgagcaagcaacggaggagggaatcactcatggaggaagagaagaagcagggcctttcgcgtcgagcgttcttgggtctgggcggcaccgcgctcgcgggtgcggccgtcgccgggctggcgggctgcgcgccgcagggttccgccgacgcgggcaaggcctcgacggcgggcgcggcggatggcgcgacgggcggcatgcccgtggccgacagcggcgcttcggccggtcccgacgtggccggcatgcacagctgggagatcgcgcccgaggacatccccgcggacaagatcacgaacaccgaggactgcgacgtgctcgtcgtgggcgcgggcctcggcggctgctgcgccaccatcgccgcgctcgaggagggcgcgaagaaggtcatcaccatcgacaagaaccccgagacggtggtcgcgcgcggcgtgcacatcgccggcttccacacgaaggtgcagcagggtctcgtggaccagggcctcgtcgaggagcccgactacaacaacgtcgtgcgccgctggatcaactgggcgcagggccgcgtgaaggagccgctgctgtgggagttcgcgcacaagagcggcgcatgcttcgactggctgtacgacctggccaccaagaagggactcgaggcgctgctgtgggacggctactacaagggtcccgactacaccgagtacccggtcacgcacatcttctaccaggccgacaagtacgaggaaaccatcaacttcaccttttaccagggctcgggcgtgggcgacgtgtacggcaacgcggtgctcgtgccggcgctgtacgacaccatcgaggagctgggcggcgagatccgctgggagacgaagagcgagcgcctcgtccgcgacggcgacggcccggtgaccggcgccatcgtggccaccggcaagaacgagtacacgcagatcaacgcgaagtcggtcatcatcgcctcgggcgactacgccgccgacgacgagatgttccagtactactcgcccatgaccgcctacgctatggacggccgcttctacaatccgcccgacgtcgacaccggcgacatgcacaagcaggccctgtgggccggcgcggccatgcagaagtccgagccgcattcggccgtcatgcacctcgacttcggcgcggcaagctacggcttcctgcacgtgaactgggacggcaagcgcttcaagaacgaggacgtgaacacccagtcgaagagcgtgacgaaggcgctgcagacgcagaaggacgcctggaccatctacgactcccatggcctcgagcaggtgaaggcccagatggacgccggcctcggcggcggtttgcagtggggtcagctcacgcagcccgtgggcggcgagtacaacctggaggcgcagcagatcgtcctcgagggcgaggtcgagagcggccagacgctgaaggccgattcgctgaagcagctcgccgagaagatgggcgtgccgcccgagaacctcgaggccacggtcgcccgctacaacgagctgtgcgatctgggcaaggacctcgactacggcaagcgccccgaggtcatgggcaaggtgcaggatccgccgttctacgccggcaagctggtggccagcctgctcaccatgtgcggcggcctgcgcacgaacaccgactgccaggtgctcgacgccgaggatcagccgatcgagggcctgtacgtgtgcggctcggccgccggcgagttcttcggcgcgggcgactatcccacctacgtgccgggtatcggccacggccgctgcgtgaccttcggccgcatcgccggcatcaacgccgccggcggcgacgccgagtcgaagatccccagcctcgacatctaagccatccctcccgggtgccgcttccctgcggccccgggccccatcgacgagccgccgccccctccctccctggggcgacggcttttccgcgcgcaaggggggcaccctctttgccccccccctccccgcgttttccgccgcctcggtcgcgatcggctataatgcctgctaagggttccagcagaacggggaagacgtttgccggcattgcggcgaagcatacaatcgagcgcgcgcgagctcgcgcgcgtcatcgcgcgggacggggccgcgtcgttcgttctcgcggtcgtcgggctggcctgctgcttcgtgttctgcagcatgggctcgtcggtggagacggtggccatgcggtcttccgagctattcgccccgtcgggacaggccgacgcgctgccgacgttcgccgtgacggcggggtcgcttgccgcctacgcgctgttcgggtgggcgccgctgcgcgcggtcgatcgcgtgcgggggtcgatgcccgtctacgccgtctgctgcgtcgcgttggcggcggtgtacgcggtgacgtccctgccggtgctgtcggacgcttccggcgcgcgggcgctcttgctcgtgctgcgcggcttcctgggcgtgacgaccctcgtgagctggttcgcgttgctgggcgatcgtccgcgcctcttccaggtttccgcgatcgccgtcgcgttcgcggcgaccgcgctggcggatctcgcgttcctcgcgctgcaggcggccgtggggtttgcgctgctggtggcgctgcccctgctctccctcggggcgtaccgcgtcgtcgcgcggaagcgctccggcgcgggcgcggctgcagctgcgccggcaggtgcggcttcagccgcagccgtcggcgacgccgagccgtcgcgcgccgcatcgggcggcgtggcgcgcgtgttgggctctcccatcctgttctgcctgctggcgggggcggtgctggggtgcatccagggcgtgggcgccgacctggtgcttgcgcacgagcagctggccgggggatacgttgcgaacaacctgctggtggccgcagcgctggccatcgccgcggcgctcgtcggcgggggcgcggcgttcgcgcacgacggcgacgacgcgcggctgctcgcctatgcgcggctgacggtcatcgtggcgctcgtgctggcgctgtgcctggccaacgtgctgatgatgtcgggcacgttcgtgtcgctgaccgccgcgaaactgatcggcgcgttgctgctggcgtacgcgtggttcgcggcgtgcgctcgcccgggcgcgcgagccgtccgcgcccttacgcggatgctcgtatgctggcaggtggcggcggcgcttttgcaggcggccgtcatggcgatggcgggcgaggggcccgtgcaggtggtgaacgtcatcgtcgtgatcctgctgggcgccgtgctggtcatgcagctgttcccgctcttcctgtcgagccgccccgccacgttccccaccgggccttcgaacggccagacgcgctcccaagcgctttcgatctccgccgacgaggccgacttggcgctcgtcgagcggttcgcggacgagtacgggctcacgccgcgcgagcgcgagctgctggggttcttcgcccaggggtactcggtggcctacgcctcggagcagctcgtgctgtcgccgtacaccgtgcgcacgcacctgcgcaacatctacgtgaagacggacacgcactcgcgcgacgacctcctggcgctgctgaagacgtactaggccgacgccgcgacgcgcgggctcgcgccggcgccgcgatggccggccgcctccttctccgcctgcgccgcggccgcaaggcgccgcaccgcatcgtcgtaccggtgcccgccttcgcacgtgagcttccagcggtccccttcgcacgtcgcccagcccgcttcggccaggcgctcgagctcggcgcgcaggggaacgggcaggctcgcgccgaagcggcgctcgtgctcggtgtgcgagaacccctcggccgcgaacaggcgcccggccacgtagcggcacgacgcctcgacgggtgtcaggacgtcggcggccgccgtgatggcgcggacgtcttcggcgtgcgccaggtaccgggtgaggtcgccggtcgagcgcgacacgacgccgtcgagcttcgaccaggcccccgcgccgacgccgagacggtcaacgtcgtcgcagcgcgcccgctggctcgcccgcagcgtgccgtccgcgctgaacaggtgctgcgtcacgcgggtgaagccgccggcgacgagctgctcttcgccggccgcacgcagggccagccgctcgtcgtcggtgggccaggccttgcgcggcaacgcgtcgaagcgctcggggtgctcggcgtagcgctcgtgcagcgcgcttccgggccgcagccgcagcggggcgagcgcgatctcgcgcgcgccgaagccgacggcgttgacgatggaggtggacaggttgacgcggttctggccgggcaggccgtacagcaggctcatgcccaggccgtcccacgagcagaacgtcagcagctgccgcgcgtcgatgtagctgttcatggggtagcagagccccagcgcgtcgtgctgcacgccgtcgaacgtctcctgtcccagctcgaggaacgtgatgcccgctttgcgatagtgcccgagcgcgtcgaagctcagccccgcgcacgtcgcttgcagggccgcgtcggcatccggcgccacctcgaacgcgttccgcagctcgtccatgacgcgtgcgagggctttgggcggcatgagcacgggcgagcccccggagaagcgcaccgacatcacgatgcgcccgcgcgcctcgggcgcggccgcgcgcagctcgcgcacgagcgcgtcggcgtagcgttcgaagtcggccaccctgccggtggcgacgagcgagtcgcagtagtcgcagcggcgggggcagtacgggaaagagaggtcgacgtgcagctcgttcatggggcgctccatcctgggtccgggggaggggctgcggtgcggccgcagcgtttcgttccgcttcgatgatagcgaggaaggccgtcgagcgcctactgcactctgcagtaaccggccgcattcatgcaggttgggggataccgaaccgcggtgcgccccgtaggatggggtcggttctgcagcgcaccacggcctgggggaagggctctcgggccgctcgctgcagggaaggaggatgcgatgagcgaacggacgaatcacctcgatgcgatggacgatctggagggcgcgacgctgtcccggcgaagcttcctggtgggtgccggcgcggctggcgctctgaccatgctggggcttgcgggatgcgcgcccagcacgtcggcttcgggcgacgcggctgcgagcgcgagcgccgatgcggccgagccggctgcgggcggcgaaggcgggggcggcgcggcaggccccgcgatgggcggcggcgcggccgatcccacatggcggaccgatcccggcgcaagctcgttcgatccgaaggagacgcgggacttcgacgtggtggtgctcggcgcggggcacgcgggcgtggcgtgcgcccataaggcggccgagctcggcaagaaggtggtgctcgtcgaaaagcaggccgaggagaactgccagaacctgggcaacgagaacggccacatcaactccgaatggcagaagagccacggcgtgcccgaggtcgatcccatgacgttcttcaacaactggcagctgaactcgggcaaccgcgccgagcccgacatcctgtcgtacttctgccatcattccggcgaggtgttcgattggcatctgtcgttcacgcccggctacgaccccatctgcgagacgtgggacgacattcccgacgagtggacgccccagctgggcagcttctacagctggccgggagccgcgaaccaccaggccgagatcgagggcgccacgtacgccggcatcacgcaggtgaactacaacgccatccaggccgcgatcagcaacgacggcatggagatgctgtggggctacgaggcggtgtacctggtcaaggacggcgacaaggtggtcggcgccatcgtcgagggcgacgacggccagatccagctgaacgccagcgtgggcgtcgtggtggcgacgggcgacatgtccacgaacaccaccatgtgcggcgagctgctgaccgagatcagcgacctgaaccccacgtccgacgggttctcgggcatggggcaggacggcatgggccagaagatgatgtactgggcgggcggcgaattcgagatcggcccccgcgccgccatgggcggtgccaacgtcagcccgatgggtccctggcagggcacgcacgtgctgctgctcgacaaggacggctaccgcttctccaacgaggccttctccacgtcgttcctcgcgggcattcccggcgcccgccacgaagcggggttcgtcagcgtgttcgattcgaactggcgcgccaccgtcaaccgcatgcccatcggccacctcaacgtgaaatggtgggacgaccaggaaggccatttcggcgccaagtactgggacaacgacttcacggccgatcacgccgactccggggccgaggggttccagacgtccgaggcggagcacggggcgttcacctgctactgctcgaacgatctcgccacgctggcgggctactgcggctacgagggcgaggcggcggagcggttcgtcgccagcgtcgagcgctacaacgagatgtgcgagcagggggccgacaccgattacgccaagcccgccgaggtcctgaacaagctcgagccgccctacttcgccatcccgttcccgaccgacgggaacatggccggcggcctggtcacgctcacgggcatgttctgcgaccgccacggccaggtgcgcgcgcagaacacgttcgcgcccatcgagggcctgtacgcggccggcaactgcatgggcggcaggttccccttgcagtacacgtcgcccatcaacggcgtgtcgatcggctttgcccaaacctcgggctacctggtgggcgagtacctgggcggcaagtaaggctcgcccgtccggccccgccgcgcgccgcacgctgttggcattcccgttcccggggcgcacccgccccgccttccccagccgccgtcccacccctcccaggacggcggctttttcacgcgaaaacgggcgggcgtttattcgaaacggtatactggcaggcgaaggaagctgtggcgaggggtcgccgagcgggcttgtggtacggggagggtgcgggcatggtaaggctgcgcgatttgatggggcccgatggcaaaggcgctcggctctggctctgctgctttgccatgggaacgtgctcctcggttcgcgtctggattctcaacaacgacatcatctcggtgttctcggcgacggacccgtttgcccgcgatgttgtgtatacatgcgcggagatactgcccctcgtggccattgccttgttggcccgctttcgcccaaccgttctgagcaatcggcttctctcgtgcactgcggctgcgtcggctgcaatcggagcggcgatgttcttatgcgtcgacgcttgggccgttcccggctggcctcagatcgcctatgctttatgcatactcggaggcatgtgggtgagcgccgccctcgcgctgtcgttgtgcaagcttgccaacccaagaagcgttgcattgtgcgtgtgctccgcgtacgccgcagcatcggtgctcgagtgggcgatgtcctctgtgccgcttgaagcgcgcgtggcgtcctgggttgccctcacgtgcatcgtgctcgtgctggcgtaccccctggcgagcgacatgattcgcgaggctgccgaggtgggggacgcgcgcgacttggtgctgagccagcctcgttctttcgtgagccccttcaacgtcgcgttcttgagcctgctcgcgctcaagctggtttcgggcttctctctggcgctcaacagcgtttccggggttcccgtccacacgttcgtcacagggctcgtccccttgcttgcaggcgtctggatagtgctgagcgggcgcgagcgcggccaagaggacgcgttgttccaaatcgcctcgctgctcgtcatcgccggcgttctggctgcgatggtgtcgatcctccactcgctgggagcgacaagcaacgtgttgcttgcttcggcgagcgagtgtttcgctttgcttcagatgctggtcgttgtttccatggccgctcgcaacaagatcgatgctgtgtacgtggtcgcatgcagccaggcatatacctcggtcgggacgatgctgggggcgggtgccggtcatgcggcgaacggcattgccaccgcaagcgatgcggctacgctcgcgtttctcgcggccctgctgttcctgttcgtcgtattttgcttcgtttggctgcgtcgcgtcagtttcgaacgcatcatatacggcattcagcccgtgaagcccttggtgatcgccgattctcatcaggcatccgagaaaggcgggagctttgagagccgctgcgctcgcttggcggcacagcgagggcttacgaaacgcgagacggagatcatggctatgctggctcggggacgcaacgggaagttcatcgaagagcactacgtcgtgtcgtataacacggtgaaaacgcatgtgaagcatatctacatgaagctggacgtgcactcccagcaggagttgatcgatgcggtcgagcacttcggagacgaaggggcctcagcgtcgcgctccgaaagcggtgccggtttggaaccggcaccgccaagggaggggtgttggtagatgctaggccttggtgcccgcgatgtggttcacggcgtgccgggcgaacgtgagcgctcttccgcacgccatgccgtgcgtgaggttgtagtacccgtctgcgaagaccgatccgccgcaattgcctgcagcgtacaagccgggaatcacttcggcgttggtgtcgagcacctgcatgtcggcgttgatgcgcaggccgtcgctcgtgtcgagcaaggttccgcccagcgtgacgccgtaaaacggggccgtgcggatctgcgatagcaggtacggctccttgccgaaatcgacatcctcttgggcgtcgtacagctcgttgtaccgttcgatggtggcgaggaaagcctctttgtgggccccttccagtttcaggccgtcggcgagctcttccagcgtatcggctttgaccacgatgcccttgtcgatccattcctgcaggtaaccgtcggttcccatgcccaccgtgttaaccatgacgcgcgtgaggctcgcgcagcccaagctgtggaaccgctcgatgtcttcggcgaagccggcatcccaaacctccaggtatacgccgcccggttgtgacgcggcggcgtgaggcgcccagtcgtagttggctgattcgttgaagaagcgctcgccgtgcaggttcatcttgaggaacggctgcgacccggggttgaactgccccgtcgcaggtagcatcggctctccgttctcgagactctgctgggtccatcccgctttggttcccggctcgacggcaccgcggtcgaatacgaacgcggcagactgcgggtccttcatggctccggcccatagagccgccttgatgcccatgccggtgttcccgggcgtccagtcggatgcggtcaggcatttcgagagaatggggttcaaggagtcgagcatctccgcattcgctgcgtatccgccggtggtcatgagcgtgtttcgggccttgacgtgcacgtacccctctttcgtgtcgaagatggctcccgtcaccgcgccggcgtcgtcggtggtcagcttgacgaggtcgaatccgtacgtcacctcgtgaccctgtttgttgatgtagtcttcgaacagctcgttgcgcttgagcttggcgtactcctcggggcaatcttcgcgggcgttgtagttcacctgaatggggggaacgtacatgtcgatgcccacgcctccatggccgagcccttgatccgaatcgaaagaaacctcgtaaccgtaatcggacatgatctgcttgacccaggcatgcgtgtcggcggactcgtcaagccacaccttcacgacccgcatgtcgttttttcctccaaacgcctggcgaagcacgttgttcagcttgacggtgtcgacctctttgcccgcttcggcgcactcggggatattcaccgcgccgtaccagttgcgcgttgcgcccacggccccggccttctcggctacgacgaagtcgatgcccaggtcggtggcgagaacggctgcggccataccggcatttccggctcccacgataagaagctcggtttccatggtgttcacgatgtccgattcttcgatctgcggtgcatcgcccaaccatgctggcgtttggccgatggtcgttttgcccgagcctgccggtgccgcctgcgcgcttgaccccgcagtcgcttcgctcgtttgttggggcgcgcaccccgccaagccggcggtggcggcgatgcccgcgaccgcaactgctcctgtcagaaagctgcggcgtgaaatgtcttccatacgttccctccttgctcgatggatgtgtcgcgctcgccatgcagccgacgagcgtctcgcatcctaggttcgtcgaaggagaggttcgtcacccgctgagggggatttttgcataaggccatgtcaaaagacgttttctgttgcttgttccaacgtcgagacccctttctctcccaagggccggtttccggggcgcaacgtttccgcaacgggcttggggcttcaggtgcgggcggggcggcgtgggcgacaatgcgcggatactgaacattccgccgaagcgccgtggccgcccccggacgcccgcgctcggcgcgcgtcgaaaggaagcgccatgcccgcatcgatccatcctcccgtgcaactgcatatcgtcctcgacgaggacagctaccagggcggcgacagcgtcgagatggcgcgccgcttcacggccgtcgcccccaccgacgtggtgcgcgcgtcgaagggctcgcagcgcgcgaacgtgctgcggttcgacctgggcgacgatgtggtgaccgccgaggccgacgacgatccgctgtggcgcgacgcgctcacaacctggctcgacgaggagttcgccgagacgtcggcgctcgtggcgcgcgagaacgacgcccgccagaacaacggcgagcagccggtgccgttcgcgtgggccgaggtgaagttcggcgcggggccggtcatcgccatccgcatgaaggactccgccatcccgcccgaggcggccggcttcgtcgcccgtgcgcgccagctgctcgtgggcggggcgttcggcgcggacgacatcgccgccatccgcatccccgcgtgcgccagcatcgaggcgcagcgcgctgacgcccaccgcgccgagtacctggaagcgcagcagtacgaggccgagcaccggcccgtgctgcaagaggtcgaccgctattccgaggaggtggaccttgcgacgggcgaggggtggaccgacgagctgcagggctcgcagtcgaagcgcgacgcgccgacggacagcgagcttgccgaagccgtggccgaggccgaggcggcgctgcgccagggcgtcgacccgtcggacatcgccgccgaggaccgcgcggccgacgtcgatgccggcgacttcgcggtggacgtggaggccgtcgaggccggcggcgcaagcgacgacgtggacacgtcgggcgagggctgcgcgctcgagggcggcggcgtacccgagcatctcgactaccgcgtgtggaacgtggcctacgccgacggcacgtcggtgcgcttcgactcggtgctgggcgaggcgctgatcgactagcgagatgctgcgtgcgtgcaagcggcaccgacatcggcaccgcttgcacgcgggcgcgggccctaccggaacagctccggttccttgcgctcgaggcacttcgattccaacatggctatcacctggtcggtcgactcgctcgagaagcgcttcgcgtcctcggggcagctcttgacgcacgcgcagcagtggaggcatccggctcccacgagcgcggggtcgtcctcgtcgatgatgccgagcgggcagcgcgcgacgcagatgccgcagctcgtgcacgcatccgaggtgagcgggcgcacgtcggcgccgggcttgagctccttgtaagggcggctgcccttgatggcgggcgcgggcaggtcgcgcgagcgcgccaggcgttctcccaggtccgcgccgaagcgctgcgccacggcgatgtcggcgtcgtcgggacggccggttcccacgcgcgcggtgagcgagtgctcgccgatgaacgcgcccgcggccgtcacgttgaacccgcgctcttccagcaggtcggcggcttccagcagcgcgtcgtcgaaggcgcggttgccgtacagccccacgaccacggccggcgtgccgcggccttccagatgcgcgaactcgtcgcgcagcagcacgggcacgcgcccggcgtacacggggaatccgaacacgagcacgtcgtcggccgcgcacgaaacgtcggccggacgctgtgccggcagcgtgaggctcacggcttcgacggaggcgtccaacggcgcggccaacgcgcccgccacctcctgcacgatggtcttggtggtgcgcgtggggctgaagtacacggcgcgaacgatcgacgacatggcgattcctctcttctcccgtaatccttcgatgataccccttttcgcacctgcgcgtcgcgagccggacggcgaaagagcccggcggggagggatgccgggctctgcggatagggagggacgggggcggggagggatgccccggtccctgaacgggaggtgctaggtcgtcgcgcgttcgcgcaactcgtggcaggtgccgcattcgaaggttccccggtggtggcactgcgcgcagtaccgcatcgagtctttggggaggtccttggagtggttgttgtggcagtcggtgcacgtggccgggttctcctcgtgcttctcgccggcggggcgctcgtgggggttcacggtggtgcccttgtcgtcggtgagcgccgtggaatcggcggtcttggccgccatgtcctcgagcgtgccgtggcacgactcgcacgtggccgggtccaccgtgaccatcgtgggcttcgaggccggcttgtcgccgaacttcacgtcggcgtgcgcggtcgagagctcgccctcgtcggtgtggcactgggcgcacgcgacgccctcggcctcgtgggccgtcgcctgcgggcaggcggcgtcggtcgccgactcggcctcgctcgtgtggcacatcgagcagtcggactccatcgtccagttcacgggctggccgtccatggccgacgcggcggagccggagccggagccggagccctccgccttctgcccggactcggccggggcgtcggtttccgccttcggcgcgcagcccgcgagcgtccacatcgcggccgtgagcgcgaggacgacgccgaggacggcgagcacgacgaggcgccggtcggcggcgtgtgcttgcacggtcatgcgcttctccttacttcttctcgtcccacgcgtcgagcgacgccgcgtggcgggccgaaatgcggccccagatcatgttctcggccacgttgccgcccgtgatgccgtaggtgtgcgagtggatgttgccgaagctgccggcgccgtacagacgcgggatgggctgctcggcgaacacgtcgagcacctggccgtgctcgttcttcatggcgccgcccagcgtggagcacgagccggggtacaccgtgtacgcgtagaacggcgggttgttcagcgggttcagcgtggcggccgaacggtggaattcggggtcctcgccgttctcgcacacctggttccacgtgtcgacggtggccttgagcgtgtcggcgtccatccacttgtcgatggccttcatcttggccgcaagctcctcgagggtgtcggctttaatgatccagcccttgtccacctcggcctggttgtcgtccgaccagccttcccaatcgcgcagctcgtcgggcagcatggtggtgaagttcccgcattcgaaccagtcgccctggcgcgtggacatcgggccggattcgaacagcgtctgatcgaacacgcaccagctggggcagtggtcgtaatcgcagatctcgtcgctgaagtgggtgaacgcatgccatccgttgtgcggcgagccgatgcgcatctcgtccacccagcgctttcccagccggtcggtgtagatgaacgtctgatccgacggcatgatgaggatgaggaagtcgttctcgggatcgcgcgtccacatgccgtacatggctccggccatgcccatgtgccacagcttgccgcccacttcctcggtcatgcggatgccgtcgcccgtgttgtacttccagccttcgaacttgaaggggtagcacttgaggtacttgcgcttcatgtcctcgttgaactcgaagccgcccgtgcagaggatgacgcccttgcgcgccttgaccgttttctcctcggagccgatcatcgtggtgcagccgacgatctccttggtgtcggggttctggatgaggtgctcgtcgtggcagtcgaacagcacctcgacgcccaggtccttgcgcttctggtcgaggatctcgaacgaggccatgccgaatcccggagggtcggcgatggactggcatccctcgccgccgggcaggaacgagtactcgggaatggtgccggcgatggccttctcgttgatgtcgtactccagctcgtacttgtcggcgtactcgcagttgcgcagcccctcgtcgatccaggcgtcgatgaccgcggacggcgtgtccacgtcctgcgtcatctcgtgccagtactggcgcatgccctccgcatcgttgatgatggcgaactcgccgttgttgatggagctgttgccgccgccgcgcaccggcgccttctccagcacgagcacctgctggccgcattcgtcggcgccgatgagcgaggcccacatgcccgcgccgccgtagccgaccaccagcaggtcgcactcgtagtcccagctcttcggcatccagtcttgcgacgcccccgtgcccgacgcgcagccggccagcgcggcggagctcgccacggcggcggcagcgacgcccgcgcccttcaaaaacgagcggcgcgacagccctcccagttcctttgcgttcatcgttcctcctctttctctttgctctttgctccttgctctttgcttgatcggcgccgcctcgaacgatcggcgccctcgatcaccgtatgggttgggggcttgcgcgccatcgagcgcaccgccccatttttgctcgatcgaccgcgccgcaggtgaggggcatcgggagggggcccttagggtgctccatccgatatgcggcgaagggcaggttgctatactgggcgcggggatgatatcgagccgcgcgggggacgcggggctcggaagaaggaggggagcatggggacgtgcctgcggagcaagctcacggcgttttgccctgattggcgatcgctcgatttctacatcgtgctgctgggcctcgcgttctgccgggcgtggatcgtgctgtgcctttccgccgtcgcggtgacgacgctcgtgtcgcattcgaactggatgttcctgcttgccggctccgtggcggccgccggcgtggccgtcgcggcgcggcgtgcggcgacgcaggcgcgattcgaggtgcggctgcgcggcgtcacgggcgcgctcaccgtgctgtgcgccgtcgcgatgccgatagcgttggcgtgcggccagccgatcatgctggcggtgctcgtggtcgtcgggggcgccgcctcgagcttcttgcaggtgctgtggggcaacgagtacgcgcgccgcccggttccgttcgcgctcgcgtgctaccccgccacggccgtggtcatcgccttgctcatcgcgctcgtcgtcggtgagcgcgggttcctcgcgttcttcgtgttcccggtcatgtcgttcgtgctgctgctggtcgaaacctcgcgcatcgacaaggagcgtccgcgcgacgagccttcgggcgcagcggccgcgccggttgccccggccgcccccgtcgtgccggcggagcgcgatcggccggccctgtcgcgcaaatcgatcgcccagctgatggtgagcattggcgtgttcagcttcctgtgccgggtgttcgactcgcttcccggcgagggcgtgatcgaccccttcgtggtgttcggcggcagctcggtgttcgcgctggccgtggtgggcatcctgttcctgctgttcgccttcctgtgcggcgatcgcttcgagcccgtgttcgcctaccgcctgtcccttccgctcatggcgttgggcatggccatcgtctcgctgttcttctacgaccattgggcgctgtcggtgctgctcatcggcatcggctacgagctgttcgacatcgtgacgtggattctgttcgtggatctggcgcagcggcgcgaggacgcgggcgggcgctaccgggtgttcgggcagggcgtagccgccacgctgtgcggcatggggttggggtatctcgtcggaggcgagctgcacgcgcgcctgctggcggagtccgtgcagatgtccacggtgggcatcctctgcgtcaccgttttggtggtgacggcgttcctcgtcattcccgaggggacgatcgcgcaggtggtgggtcgtcgggggcgcctgcgcggcggagagcgcgacggcgaggagggggaggggcctgcggcgggcgcggcggatgtgggcgctcccgcggtgccgcctttggagaagcgctgcgaggccctcgccatcgagcggcatctgacgcctcgcgagggcgaggtgctcgtgctgctggcgcgcgggcgcacgctggccatcgtcatgcgcgatttgcagatagccaaggggacggcgcagacgcacatcgagaacgtgtacgcgaagctcggcgtgcataagcagcaggagctcatcgacctcgtggaaggctgcgaattgaaggatgaggcctgatcggagcaaaatacgatgctccatctgatgcgggggacgggggcgtgggtatcatgggagtcgcacatggtccaagcgatacaaggaggcacctatgggacgaatcgtcttgcccgtatacaccccgcactacatccccaccggcgacgaggttgccgtcatcgagacgtcgcgcggcacgatccgcgtgcagctggccggcaaggacgcgcccgtgaccgtgggcaacttcgtcgagctggcggcgcgcggcttctacgacaagctgaaatttcacgcgcacaagcccggctccgtggtgctgggcggttgcccgacgacgcgcacgctggggccggcgcaggtggacgccgccgcgcgcggcgtgatccgcggcatccaccccggcacgggcgacgcgcgctacgtcatcgtcgacgagtgggaagccaacccgaacaacaagcacgtgctgggaagcctgtgcatggcgcacaagtccgacccgaactcgggcagctgccagttctacttctcgctgtccgagcagcccgaattcgacgacaagttcaccgtgttcggccagaccgtcgagggcctcgacgtggtgcagaagctgacgatcggcgacgcgatcgtgcatatcggcatcgagggcgccgacgaggaggcgctcgccgaggcgatctcccacgagctgccccgcccgaaaaccccgaaggaagtgctcgaggagctggagcgggagcgggccgagcgcgaagcggcggcggcgaaggaagagtaaacgcctccctactcgtacgtttccaccagatcgatcagctcttgctgcttgtggacgtccagcttgcggtagatgttctcgatgtgggtgcgggcggtgcccttcgcgatctgcaggtcgcgggcgatgatggacagggtgcggccgtaggccagcagcacgatcacctcgctctcgcgcggcgtcaggccgtagtcgcgcgccacgcacgcgcagtgctgctcgaggcggcccgcgcccgcgtccgcagttgcgacggcgggcgcttcctcggcctccttctccttgcggctcgtgcgcatcgtctgcgacagctgtgacaccacgccttcgggcagcaccatgaacgccaccaccacgaggcacagcgtcgccagcatggccacgacggagatctgcacgtcgccgctggcgatcatcgcgtcgcacgccttgcccgccagcgtccccacgcccatgcccgcgaacatgaacgccacgcccagcccgaagatgtgcagggcgttctcgttgcgccggcgcgacacgtccacgaacagcacccaggtgaggatgtcgaagaactcgtagcccgcgttgatcagcaggatggacaccgcggcgtgcgtgtcgaagaacagcgcgatggccacgaatcccgccaccatgatgggcagcgacagccggtacgtgagcgtcgcgttgaaacggtcgcgcagcttcgcggcgatgagcaggaacgcgacgcccaccgccatgagcgcgaagatggcgcttccgccgatgaaggagaacgggtcgacgtgggacggcatggcgtcgaacagccggcacaggaacgagaacgtcatgatggagaacatgagcttgcccacgccgaacttcgcgctgggatcgcagtcgcgctcgcgctcgcggtcgcaacctgcgggctcgccgacgcgtccgtccgcctcgccgtcggcggcgatcgcgcccgaggattcccctatcggcttctgggcgaggtcgctccacgacagcccgatgcggttcgcctcgaacaacagcaggccgaacgacagcagcgggatcaccgcgaagccgatgaggctcgtgtggtcgctcgacatgccggccacgagggcggtgacgatggccgcggcgggggaggcgatcgtggcgaagaatgtggcgtggcgggcgaaacggtcgccccacagcacctggagcggcccggcgcccaggccgccgacgacgaacccgaccaccatgagcggctcgctgcccatccaaagcgccaaggggatgatgatgccgctggccgcgagggcgacgggcgtgaaccggaacagcgcgacgcgcacggttccctcccgcttcccgctgcggttcaccacgaacgacacggccagcgcgctcaaggcgccgaacagcagataggcccacgtgaacgaggatgcggcccctgcgacgagcggcgcgcccaggcagaagacgatccacgcgcggcacaggccgaatccgatgacggtgataaggtagtcgagcgtgcgcgaatcgcgctcggcggcggttgcttccgccgccgattcgaacgccagctcgccgacgcgttcacccttggtgccgtactgcatgtgcatctctccccagcgttcatgccacgggtcgcgccgatgagcgcggctccctcccgtctgcaacaaaaccatgtgtagtatcatacgcaatttcaaacgttgatcaaatcggatggagcatccgataggcggttgaccaggaaaatcctatccaacgtcagataccgcgcccaaaatcagactgctcatcagatgtgccttctcggttggaagcgtagggttcgtccttgcaagaacggatgcttctaaggaggggcattcattcaagtaggaggaaggaacactatgagcaaaggcatggaaggcggagtttcccgtcgttcgttcctgaagggcgcgggcgtcgctgccgcagccgtggcgggttccgccgcgctggccggctgcgcgtcgggttcgacgggcgcggcttcgggcgattggctgccgaagagctgggactacgagtgcgacctcttggtcatcggctatggcggcgcgggcatgtgggcgtcgctcatcggcgccgacgagtgcggccaggaagtcatcgtgctggagaaggctcccctcgagggcggcggcaacagccgcatcaacaacggcgagtggaccatcgtcgaggaaagcgacaaagagcgcttcaagaagtacatcaaggcgttcacgcacggcaagacccccgagccgatgatcgacgcctgggtcaacgagtgcgttcgcaacaccgagtacgccgacaagtacggtatgacctacgaggtgtccgaggtcgcgctggccggcgccatccccgagtactacttcctggacgacaacgcctacgagggctcctgcaagctgtcctccgtcgacggcttcggcatgctgtcgttccgcgagctcgacgcgcagcgcgagaagctgggcgtgcaggttctgttcgactgccacgacgagcgtctcatccagaaccccgagaccaaggagatcgtcggcgcgtatacgatgatcggctccgaggagaagacggtcaaggctcgcaagggcgtcatcatgaccacgggcggcttcgagttcaacgaggatctcaagaacgcctacctcaagtgctaccccttcaagttcgagggttggcagttcaacacgggcgacggcatcaagatggtcgaggacgtgggagcgaagctgtggcacatggacatggcgatctccatgtactccatgtggacgcgcgatcctgagaacgacttctccatcctgtacttcatgcccgccaacagctacttcaacgtgaaccgtctgggcaagcgctacgtcaacgagaacaacatgggctcgccgcacaacggctggcacacgctgctgtcgttcgacgactccatcgacgacttcgaccgcatcccgtcgtggggcatcttcgaccagacctgcttcgacgccggcaagctgtccaccagccagggcgatttcttcgagtgcggcaacttcgccagcgacctgcccgacgagatccgcgcatggaacggctggagccaggacaacaaggctgagctggataagggctggatcctcaagggcgacaccatcgaggagcttggcaagaagatcaaggagttcgaccactggatggacgtcgacgccttgaaagccacgttcgacgagtaccaggcattctgcgaggcaaagaaggacgcgcgtttcgaccgctccgagaagacgctcgagaagctggacgacggcccgtactacgccatctccatctaccccggctcctgctccaccttgggcggcccgatgaagaacgagcacggccaggtgctggatcccgccgagaaccccatcccgcgtctgtacgcggcgggctgcttcggcaacttccagagccacagctacggcatcaccggcggcaacaacgccgagaaccaggtgtggggccgcatttccgcccgtcacgccgcgggtctcgagccttgggacgccaagtagcatcctcccttcgctgatcggttcggcgctgcgctccccagcggcgccggatgcgactcaacccccgcgcccgccgctccctcggcgggcgcatctggcgggaaaccgccttccgaactgcaatacgactgataggagaagcgcatgaccgtgcaagcacacaccgccgaccggcgcctcgtcgtgctcgccgtcctcggcgtcgtcctcgcgctcacggccgcgatgtggacgctcgcgggctgcgcgccgaaggcggagccctcggctccggcggcgtccgagcagaaggacgggaacggcggctcttcggccatggacggccagccggtgaactggacgatggactccgactgctcgatgtgccacaccgtcgaggccgcgtcggcgaccgacgcgtcctgcccgcaggcctcggcccacgaggccgagggcgtgacctgcgtccagtgccacaccgacgaggccgtgctctcgaccgagcacgccgacgtgaagttcggcgacaaggccgccaccaaggcgaccgtggtcacggtggaccccgagacctgcatctcgtgccacggcacgatggaggagatggccgccaagaccgcggactccacggcgctcaccgacgacaagggcaccacggtgaacccccacgacgtcccctcgaacgagaagcacgacgccaacccggcgacgtgcacgagctgccacaacaaccactcgaaggaccaggccaaggacgcgatgaagtactgcgcccagtgccaccaccgcggaaccttcgaatgtggcacctgccacgagctccgcgagcgctaagaagcaacgaacaagcatacccgcccgagacggaatcccctccctccctttccgtttcggggtcatcgaagacccggcccctccctcggccgggtctttcgcgttgggatcttcgcgacctggccttatgtcgggcacctgacagcgtcagctcctgacattcgttggcgttgtcgcccgaaagcctcgttttcaagcgcgattccgcgtttttacgggcgacaacgttctctgtggggcctctgcgtcttcgctatactgggtcgaacgacggaaggggacggcatggagcgggaaccgcgctacttcgaatacggcgaagcggaggtcgcgtaccttgcggcgcgcgatccgaggctgggcgaggcgatggcggttatcggacgcatcgagcgcgaggtgcaccccgacttgttcgctgcactcgtgaactgcatcgtgggtcagcagatagcgacgaaggcgcagaccaccatttggaaccgcatgctggagcggttcggcgaagtgacgcccgaggcgatggcggcgtgctccgacgacgagctgcagcaggtgggcatctcgtttcgcaaggtgggctacatcaagggggcggccgcgcgcgtgctgtccggcgaggtgggcctcgaggggctggccgagctatccgatgacgaggtgtgccgcacgctgtcggcgctgccgggtatcggcgtatggacggccgagatgctcatgacgttctcgatgcagcgacccaatattctgagctggggcgatctggccatccatcgcggcttgcgcatggtgcaccaccaccggcgcatcacgcccgagctgttcgcgaagtaccgccgccgctacacgccttacggctcggtggccagcctctatctatgggaggtggccggcggcgccatacccggcatgaaggactgggctccgaaaagcgagaagaggtagggaggggcgccgaacgcggtgcgcgcgtttcgccgtatgtttcacgtgaaacatcggttcgtccgagttttgctttccgcagtcgttgtcagcaatgaaaaagagacccgtcggatcatccgacgggtctcttcgtatcccgtggtgggcgatgagggatttgaacccccgaccttgtccttgtaagggacctgcgctcccgctgcgccaatcgcccggttttcgtcgccttgcggcgagcacctattctcgcatagaaggcgcgttcgcgcaacgaatccccaggaaagccgcatctaatctgccgcacgttggagcggcgtgggattttgcggtgcggcgcatggaattcgcgttggaaacggaggtgcgaaatgtgtaatcggcgttggaacgacgtcgcaaacgggtaaggtccaggcggcttttcatggtgaactgtgccatgaaaacgtgagatgagctggtcatactgaaaggagggaaaacggcggagaggacgaaatgaaacggagcagaacaaccatcatcggcattgcctgcgggctggcatgcgcggcatgcgtgttcgcctacgcccagggcgtgcggggagaggccgacgcggcgcgcgcggaagctctggcgcgctacgggggcgagcagctggaagtgtgcgtggctaagcgcgacatcgcagcgggggagtcggtggacgcgagcgcggtggagacgcggttgtgggtggccgacttgctgcccgcggaagcattccgatcgtccgacgacgtggtgggcaagaaggcgtcgtcgacgatccttgcgggcgaggtgctgtcggagcgccgcttccgcgatgcgggcagccgcctggacgtgcccgagggcctgacggcgctcagcgtgccggcgaaggacgtgcaagcggtgggcggcgccgtggcggccggctcgcgggtggacgtttacgccaccggcggcacgtcgaccgatgtgctggcgagcggcgtgctggtgttggcgaccagcgcaagcgcgcaggagtcgacaaccgacgcgaaggtgtcgtggatcactgtggccgtcgcgcccgagtcggtgcaggagatcgtcgcggcggcgcagaagacggagctgtacttcacgttgccgggaagcgagggagagcgatgagcggatctttggtggcgctgtgcgccgatacgacgagtttgcagcatccggagtctatagggttggcgggagagaacctggctgcacaggattggctgcgcattttctcctcggcagaggaggcgcgcaggttcctgcgcacggatcgcctggttgacgaggtgtgggtggcgtcgagcgacgacgtcgctcccatcaacctggcggccacgctcaagcgcgaccgcagcgatcgctgcgtgtgcatgctgtcgttcgaagacacgggttcgctgaagagccgcatgagcgccacgggcattgacgcctcgctcacgcgtcaagccttggccgagcgctacgtgcgtcgcaagcaggccttcgcctgcccgtggcccatggcggcgcccgcagccccgcggcaagcgccgatgccggcggcgatgcccgtctcggttgctccggcgaccgcgccccagccggcgcggtgcgacgagcgccgcccgggcgcgcgggccgggttccttttcccggtggtcagcggaagcggcggcgcgggcaagagcacggtgtccgtgctgtcggcgctcatcgcgcagaggatgggctacaacaccttgctgctggatttcgacctgcagttcggcgacgccccggcgctcatgggcgtgcagaacccgttggccgtcgatgacgtgctggcggtgccgtcgcgcctcgatcagctgcggtcggacggtcggatgccggcgctgctggccgcgccgcgccatctcgaagacagcgaagcggtggtggagcgggcgccccagctgctcgaccagctgacggcccggttcgacgtcgtggtggcgaacacgggagccgcctgggccgagcagcatgccctgctgctggagcgcagctcgaaggcgctgttcctgatcgatcagcggccgtcgtcgctgcgcgcctgccagcatgcgctcgatctgtgtgcgcggtgcggcatcgcgaccggccctttcctgtacgccgtcaaccgatgctccaagaacgccctgttcacgtccatcgacgtgtcatgctcgctgcgcggggctcacgtgttcgagctcaaggacggcggcggcgaggtggaggagctgctgggcgcggggcttccgttcgatctgctggcgtcgaggaacgatttgtgcgcgagcctcgagcgcgtgctgtcgggcgtgctgccgggcgataggcgcgcggcagccccgcctgaggaaggcgcctctcggggacccggtttccgcttgcccgtcggcaagaagccgcgccgtcgccggaaggaggccccatgtctctgatgagccgcgtgcgcgacatcgacgacgtgccgacgctcgccgcgagtgcggacgacaacgcgctggaacggctcaaggagcacatccagcggttcgtgtccacggacgatatcgccgccatcatggccgaacagcccagccgcgcccgcaacgagttgaaaagcgcgtgccgccaggcgttcgaggacgcttcctgggcgggcgtctcccagcgcgagcagcagcggctgaccgacgggctcatcgacatggtgttcgggttcgggccgctcgaatcgctgctggccgacgattcggtcaccgagatcatggtgaacggcccttccgacgtgttcttcgagcgcgacggccggctgcatcgcagcgagcagcggttcgccgacgaaggccagctgcgcgcgctcatcgatcgcgtgctggggccgttggggcgccgcatcgacgaggcgtcgcccatggtgaacgcgcggcttcccgaagggcaccgcgtgcacgtgatcatcccgccgcttgcgctggacgggccggtgatgaccgtgcgcaagttcgcgaagcgggtcatgacgttggacgacatggtggccacggggtcgttcgacgaggcgatgcggacgtttctggtgtgggcggtgcgcgctcgcaagagcatcgcggtgtcgggcggcacgggaagcggcaagaccacgctgctcaacgcgctgtcgtgcgagctgccgccctcggagcgcatcatcaccattgaggattcggccgagctgaggttcttggagcatccgcacgtcgtgcgcctggaggcgcgtccccgcaacgcggagggcacgggcgaggtgaccatccgcgacctcgtgatcaacgcgctgcgcatgcgccccgaccgcatcgtggtgggcgaatgccgcggcgccgaggcgctggacatgctgcaggccatgaacaccggccacgacgggtcgctgaccacgctacacgcgaactcgcccgccgacgtggtgtcgcgcctcgcgacgatggtgcgctacgcggtggacctgccggttgacgtcatcgagtcgaacgtggcaagcgccttcgaggtggtggtgcagacggctcgcgcgctggacgggtcgcggttcgtgtcggacgtggccgagctcgtgtacgacggaggaaagcgctgctgcaaggtgcgcccgctgttcatgcgggggctggctgagcgtgtgggacgctgggtggcccttccggcttggatcgacgaggtggcggacatcggcgttgccgagagagaggaggtggagcgatggaagcgcacgtcgtacttggcggcgtaggcgtgctcgccgcgttcggatgcggcgcggcggcaagcgcgtcggtggcgggtcgcgctcggcgtcggacggcctccctggtcggcgagggggacgtcggatcgtcgcgcgtcgcctggctgctgcgcaacggggtcggctggacgcggccggtgacgcgtgccctgctgggcaatcgcgcgctcgcggcgctcatgcgcgaggctgtcggcgtggtcgatgcgcgcgggttgatgacgaccgaggaatcgctcttgtcggtatggattgcggcgatggtcggggcggggatgtgcgcgggcgcagcggcaggctcggtcgtgtgcggcatcgccgtagccgtgtgcgcgtgcgcttgcgcggtcgtgtggctgcgcacggtgcaggacaagcgccgcgacgccctgcgcgagggcatccccgacgccctgcgctccatggccgtgtgcttccaggcaggcttgtcgctgctgcaaacgttccagcaggtggcaagcgaggtacaaggcccgctgggcacgctgttcgcccgcgcggcccaccagctggaaacaggggagggcgccgggcgcgccttggaggtgctgcgcaggggctcgtcggtggccgagctggcgttcgtcgcggtggcgctggacgtgcagcatcaggcgggcggcagcatgaagcaggtgctggacgcggctcgcgacacggttcagagcgagatcgagctgcgacgcgcgctgcgcgtgcaaacggcgcaggcgaagctgtcggcgcgcgtggtgagcgtcctgcccttcgtgctgatagcggtgttctcgctggtgagcgaaggctttctggatccgttcttcgccagcccgatgggcatggcgctgctggcgatcgcgctgggcatgcaggccgccggcatcgtggcggtgcgccgcatgctggccgtggaggtgggctgatggaggccgtgcaggcgcctttcctgatggctgcggctgtggccgccgccgggatcgccggagggctggcgggctcaacgcttcttcggaggcgcgacgcgacggcgcgacgcgagcggctgcgcaaagccgccgacgtgcgcgacgcgcaggagggtttcgacgcgggctcgcggctcgtgcggtacgcgacggcgctcagccagcggatcgccctcggagcgaccgaggcgctttcccgtcggctgcggctttcgcgggcgcgagcgtggttctgcgcgcgggcgaagcgggcgggcttggagcaggccgtgtccccggaagggttctgcgaggcctcgatgaggctcgcatgcgccggagggctggcgggcgcgctcgtcggctcggtgctctccacggagcttgccgtgctcggcgccgtcgcaggggttgcgggcggcgcggcggcgatgccgcgagccgtcaagcgggcgcagcgcgagcgcgccgacggcttggaaagcgacctctcggagatgctcgaggtggtggcgctcggtcttcgcagcgggctttcgttcgaccgcgggttcgcgctgtacgggtctcacttcgattcggacttggcgcgtgcgtgcgtcggcgcccagcatgcctggtcgctgggcttgacgaatcgcgaagacgcgttgcgcgacctggcggcctcgtacgactcgccgctgttcgcgcgcgtcgtggagaacatggtgcgctcgctgcgcttcggctcgtcgctggccgaggggctcgaatcggctgcggcggaggcgcgcgcggtgcatcgggcgcaggttgaggagcgggtggcgaaggctccggtgaagatgatggtgcccacgggcacgctcatcctgccggccatgctgctgctcgtgctggggccggtgctgctcgaactgatggaaggaatgtaggaatgaggaggttcgcacatggagacgtactggagatggatggcgaaggcgacgtgccgggttcggagagtgcttgctcgagaggatggacagggcacgacggagtacgccatcctcgtcggagtgctggtggtgatcgccatcatcgcgatcaccgtgttccgaccgaagctgcaagagctgtgggacagcatcgccgacgggatcaacgcgctgtagaggagaagggcggcgcggtgatccgtgcgggctcgttcaacgaatgcggtcagggcacggtcgagttcgcgctggtgacggccgcgttcttggcagcagtcatcgcgctgggcgccctgtggcgcggtttggaggccggcatgttcgtcgatcatgcgctgatgtcggcttcgcaccatatccagatgacgatgccgggatcggtcgccgatgtgtttttgtactgacgggttcggaaaggagggagcgggtatgcgacggacgtgcgaatcgggccaggccacggtggaggcggcgtttctgctgccggtgctgttcgtcgggctcctgctgctgatgcagccgggcatccttttgtacgatcggctggtgatgcgggcggccgcgtcggagggatgccgcctgctggcgaccaaaaccgctgcagcgggcgacatggccgagagctgcgaggcgttcgtccgccatcgcctgggagcgatccctcccgtaccctgcttccacgtgcacgaaggcgcgtgcagctgggacatccggttcgaaggcgacgagcgctccgacgtcgtgcgcgtcaccatcgcgaacgaggctcgtccgctgccgctgctggatgctggcggcgctttgctcggcatcgtgaacggcaacggcaacctcgaagtgcgggtgacggcggaggagtctgcgcagccgtcgtgggcgcgctcgtccgatgcgggcggcgacccggcgggatggatcggggcgtgggcgtcatgatgctcgatgcgttccacgacgaagagggcatgacgacggtgggcatggtgctggcgctgctggtgacgcttgcgctcgtattctcggcggggcaggcgtaccgggtgggctcggcctcgtcggaggtgcagaacgtggccgatgcggcggctctggccgcgcagaacgaggtgggcgagttcatgatcgtcgtgcgggtgtgcgatgcggcggtgctgtcgctttcgctgacgagcctcgtggcgacggggctgggcgtggccgcgctgtgcacgccggccaccgcctccgcatccgagaccctgctgaaagcggggcgcgacgtggcctatgcgcgcgaccggttcgccgagaaggcggccgacgggctcgaccgcctgcaacggctgctgccgttcctcgccgcggcgaacgcggcatcggtggcgtcggcgaacaacggggcttcgtcgagctacgtggcgctcgcgcttctcgtgcccgcttcggggaagaagatcgcggtggacggcgcggccgagctcgaagacgtggccgaggcggtgggcgacgaggccgacgaggtgcggcaggcggccgacgaggccgagcgcgccgccgagcgggccaacgaagcgaagcgccgtgcattcgagcacgactgcggcctcgatccgtcctattgcatgtacgagcgcgcctctgcattggcaggcatgagcggatcggagaacccgctgttcagaagcgttgacgcctggtcgttctccgtggcgctcaagcgcgcgcaagcctactatccgcggcgactcgccgtggaggccccggcggacggctcggtggaggagcaggcgcgctcggcgctgcgcaagcggttctacgccttcgccgccgacgaggtggggcgcggatacgtccatgaaggcgccgattccttcgacgcgtggtttccgcgccttccgaagaacacggaggagatgaggtcgacggcgctgtacaccgaggccgcgtacccctgcacggtggacgaggaagggcgcgccacggctcatgcatgggccggatgccccgctgcggccgggtcgggaagcctcgtgtcgatcgcccagacggaggcggagccgttcgccgagtgcgcggaatgcggcttctcggcggccagcatgggcaaggtggcggccgcctcgtcgtccatcgacaacggcttcgagtaccactacgaagccgtggcgaaggcggccggcgagtacgaggaggcccgggctgagctggatccgctggcagacgaggtgaagcggcgtgcgggcggcttgttcgacgaggtgaaggacgcgctcgccaaggtggcgggcaagcgcctctctgcgcagccgccgggacgctacggcgtggtcgcgctggtcgcgaacacggcaagcgtcgccgcatcgagcggtttcgacagctcgttcgtgcggggagggggcgcgcttggcgcgcgggcggcggtttcggccgccacgctcgtcgccgactcgtccgacgaaggcgccaccgtggtgtcgtcgctgctggacggcgtgaagggccagggaggggcggccgtgggcgcgctgggaacggtgctcgactgctggtccggcttgctggacgcgtacgcgcagggccaagaggcgctcgacgattctgtctcgtcggcgttggacgggctgcctctcgcgggggccagcgggttgggcgcgtgggcggcaggtgccctgcgcgaggccgtgcgggccgcggggctcgctccggccgaactcgacgcgctcaagccggtgttggtgaattcggcgcatgtcgccgagcgcgacgagggggcgttcggcgcgcggctgctctcgctcaaggagcaggcgatcgagcatccgctcgggtcgaacgacgtgttcgcctcgatcgtggggacggtggaagccgaggctgtcgaaggcatccaggggttcgacggcaccatcgagatcgccgagatcgagctatgggacggcggcccgtcgttcccggtgaaggtcgcgttgcctcaggcggcgaaggacgcagctgccgacctggtgcaacggacggctgacggattgcgcggcgtgtacgcgcaggtaacgggggtgcgggtatgggagtgatgcgaacgtgcgacgaacggggtcagatgacggtcgagctcgcggcggcgtttccggtgctgatcatcgtcgcggtcatcgcggtgaacgcgctcgcgttcttctcggaatgcgccgcgttcgacaacgtcttccgcgacgcggtgcgcgtgcatgtgacgtcgcctgccgcgggccagggtatcgagcagagcagcgccctggtgcagacggcgctgtctgccgcgttcgatgcggagaacgaggcggtgcgcgtgtcggcggaggcggtttcggggggccatacgcgcttcacgggcaccttggagtacatgcccacgctgttcggcctggggttgcgctcgacggtgttcgggatccccctgccgccgctgacgcatgcggtcagcatcgcggtcgactgctacaagccgggggtgctgctgtgagcgggtcgacggtaggcgcccgtcgccgcaggcgtgcttgggcggtcgtggctgcgctcgttgcggggtgcgcgctggcgctcgcgttcgcgcaagcagatcggccgagcgtgctgcacgaagcgatgcggacgacggccgaatcgagcggcgccggtcctcctgcgggcttcgaggacgaagcgttgcggctcgaaggacgacaggacgtgcgggtcgacgagcgcagcggcgtgctgggcttcacccgctcggacgacgttgcggacgcgctcgctgcgatcgagggggagttgctcgccaaaggatggagtggggtgcgcagcggaaacgaaggaagcgagtcgttcgtgaaggatgacggccggtatcgatggatgttcgtcgcctgcgtggacgcaggcggatcgaccagcgtcgtcgtgcgctacacgacggaggaaggagcgtgacgtcatggtggaaccgaaagatccgtcgctcggtgcgtctggtcccgaaggggacgcgcgcgttgggcggccgttgctgatagccgcacgctttcgccgcaaggcgaaggggctgctgttctcgcccgagcatgccggggcgctgctgctcgcgccgtgcaacgacgtgcacacggcgggcatgcgccatcgcctcgacatcgcgttcgtcgacgcgcaggggctggtgctcgaagcccatcgcgacgtggagccgtgccggaggctgcgcaacaaaagcgcagaggcggttgtggagaggttctcgtcctgcgcgaccccgtggttcacggcgggcgatcgcgtgggagtggtttgcatgaaaggagatcggaaatgaaaacgtgtccgacttgcggggctcgcgcgttcgacgacgccgaggtgtgcttcggctgcctgcatcgctacggggaggagcccgtccgtccgaacgtcgcgatgccgacgatgccgtcgtcgcctggaacggggcactgtccgacgcttcgtcccaaggcggctcccgctgagccgaaacctcctcaggaagcgccgccgcgcgacggggcggggtggaccgttcggttcgagttgccgggatatgcgcccgtgatggaagcggacggtcgggaaggcggagtggtcgtgcggttccagccgagcgacgaggtgggaggggctggcgacggcgggcggcgggttccgcgcggcacccatgcgcgcgatgcgccgtcggagaaccgcgcgtcggcgagcgcggcaggccgctcgtgacggccccgatcgcgctcgtcctcgcggccggatgcgcgggcgggctgatcggcgcgttcttcgtgccatggtcggcttccgtgcttctgggacgcgcctatcgccgcgctcgctcgtggtggtgggattcgctcgacgcctatcgggcgttcaagcaggcgcatcctctcagggagccttcgccgcgcgcggcaggagccgaggggtcgctgggcctgtggcgggctcaggcgctgcgcgacgcccaggcggggagccttccccgcgagcggctgcaggcgctgaacgaggcgggatgcgcggctggcgcgcccgagccttcgcgcagcgaggccgatcaggaagcgcgctgctcgtttcgagcgaaacgatggcatcgctgccttggcgccctcgtcggaacggtgttcggctgcgccgtcgcgtggtgcgcaggttcgcctctggtcgcggcggcgttggcggtagcggcgacggccatggctgcggccgtgatatgcgatctgcaggcgaggatcgtgccgctcgaggcgtgcgcggccctcgcggcggcgggcgtcgtcttccaggcgtcgaccgcggggcttgagggcgtgctggccgggtgcgccttcgccgtgttcgcggtgctgtgctgcctcgcgctgaaccggctgttcggaaggacggggcgcgcgcccgtgggctacggcgacgtgcgctgcatggcggcgctttcgctggccagcggcgtcgcgacgccggtgggggcggcgctttgctacggcggcgcggcggcgttctcgctggcgggcatcgccgcgggaaagctctcgtggagaagcggtatcccgatggcgccgtttcttgcggcatggctggtcggaggcgcgtgcgcgtgcctgcacggtatgggatgaatcgatgaaaaggagttgagcatgaacatgatcaagaaaaacacggcatcgagattggacaaggtcagggcgttgctcgtcgtgggcgaggaggacggcggttccgagatcgtgcagacggtcatcgtgctggggttcgcggtgggtttgggggctgcgctgctgttgctgcagggcaacatccaaaccgccatcacgaaagcgggaacctcggtgaccgacatgttctcgaagatcacgtccggtgcggcgtaaaggacgctcggaacggggcggcagcgtcgtggcgttcgtcatcgcgctgcccctgctgctcctgttcctgttcgcagtggtcgatctggggcgctctgtgttcctgtccatggcgctcgacgacgcagcgcatgcggtatgcgaggcggcatcgggtcatcctgcgggcgatgtcgcggaatcacagctgcgcgaggcggctttcgctgcggcgccggcgctcgaccgcgacgatctgcatctggacgtctcggttcgctatggcgagttcgaggatcgcccttacgagcatcggttctacaacgagaggacggatgcgtacgacgaacgaacgtcgttcgcccgatcgcggccggtcgaggtcgcgctcgtgctcgagggcgcgtacctcacgccgctcggcgcggggctgtcgagcggaggcgagggatccggtcggttcgcgttccgcgcccaggttcgcggcgcggccgacgcaacggtggaaggaggcgcgtggtgatgaggggcgagcggggaagcgaagtggtccagttcgtgatcgtgctgccgctgctgttggcggtggtgttctcgatcgtgcagcttgcgggcatgacgcttgcggccagccagctgtcgtccgagatcacgcgcgcgtgccgccagctcgatgccacggggttcgagctggcggcgaacaaggagcggttcgtcgaagagggcatcctgggcgcgtcgacccagctcgaccccgctcgcctgcatgtggagcacgtcagctggacgagcgagcggacgaagcgggagcagcccgtgcgcgacggaggagccatcgaagagcagtccacggtgatcgaggcatcgtacgacgtgagctatctgctgcccgccgtcgccgatctgcccggtctggcaggccgcgtgctgaagcgtcacgtgcgctgctcgttcgtggatgggcgtgcgatagagatcaggcaggaggggctatgaacgcaagtgatcgtcgggacgagcgcggatccgcgctgccgctcgttcttgtggcggctctcgcgctgttcgccgtgttggcgttctccgtcgatcagggcatcgcctacgcggcgaaggcgcgccaagagaacgcgctcgatgcggcgcgggcagcctgcatggacgcatcgttcgcgctcgtggcgaaaaacgcggacgatccgggccgcatggtggccgaccgcgtcgtccgcaccgcgcgcgatgcggggttcgaggggaaggcgtccgtgtggttctacgaaacgccggaggagagcgtctcttcgacggagcgccactgggtcgtcgggatgcagttcgaggaggagtcgcccacggtgttcgcgcgcgggtacggcatcgaagggctgccggtggcgtcgtaccgggtgctgacggcgatgccctatgccggggaaaaggtgtggcggccggaaacgaggcgctgcggacgatacgactacccggcgggagcgactgcggactcatggacgtacgaggcgctgaactcgctcgacgcctttccggcggagcttgccgaagcggcgcgggcgacgttggccgagagcgggaaataggccggttcgatccggcggaaacgagagagaggaaccgattatggtgatgggcggcaacggcggtgatgcgacggcgtggggcggaggcttcgcagcgcgggcttcgcggcgtgaaacggacgaaggcccggcggctggaagcgtcggaggaggccgaacgggatacgtgacgcctcggggaggcgcgtcggctgcagcgtcgatgccggctgcagcggcggatcgcgcgaagcctgcgatgcccaagccgcggaaaggggataccgtccgggtcaaacggctggcgacgatcgtcgccgcctcggtagcgttgacggcggtgtcggtttcgtacggcgtatggtccgccgccgcgtcgcgcgcagcggtggagcacgccacggccggcgcgctccccacgctggtggctgccgcggacatccgcgcgggcgacgctatcacggccgaggccgttaccgtgcaggacgttcccgcaacgtaccgggcggcttcggcgctcggcggcgaggcgctcgatgccgaggggctcgctgcgggagggcgtgcgatcgtcgatatcccggcgggaacgcagctgtcctcgtcgttcgtgacggggatgggaggcgatcgcctctcggccgagctgggagcgggcttgcaggcggtgacgctcgcggtggacgtggaaaccgggctcgcgggccacgtgcggccctacgacacggtgcgcatcgtgtctgcggagggcgcgtcggcaggcgaggcgttcctcgagacggtgtgcgagcgcgcccgcgtcgttgcggtgggcgacgatgcaaccagcgtgcagagcggttccgcctccgtcacggtggaagtgtcgcccgaggaggctgacgcggtgcgcgaagcccagttcgcagggagggtcagcctcgttctcgtggctgccgacgatgcgttcgaggaggtgggcgccgatggacaggacgactgagcgtgcgctcaagagagccgtgcgcgacgaggcggccgtgcggttgcgcggcgatgccgtcggccctgacgcggtcgaggcgctcatccgccggctcgtggaggagattgcgagcgagtcgggcatttcgctacccccgtacgagttcgaggggcttgcgagtgcgatgatcgacgactttctccgctacgggccgctccagcgactgctggaggacgaatccgtcaccgagatcatggtcaacggcggcggcatcgatctggacgatccggcgctgccttttcgcgcccccatcgtgtacgtggagcgtgccgggcgcatcgagtaccgtcccgatgtggagttcgacgatgcggagcacgtgcgtcgcatcatcaacaagatcgccgaacagtcgggcaagcgatgcgacgacgcgcacgccatgggctgcgcgatgctgccgggaggccgggcgcgcgccacctacgtggtgccgccgatcgcgccggacgggccggcgctcaacgtgcgcacgttctcgtcgagcatgctgggcatggaggatctcgtgcgcatgggtatgctgaccgacgggatgtcgcagttccttcgcgcggcggtgcaggcgcgctgcccgcttgtgatatcgggaggcaccggatcgggcaagaccaccctcttgggcgctctctctgggttcatccctcccgacgagcgggtgatcaccatcgaggacacgcccgagctgcgcctgcaaacgccgcatgtggagcggatgcagacgcgcgaggcgaacacggagggcgagggatcggtgagcatgcgcgagctggtggcgttgtcgctgcgtcgtcgtcccgatcgcatcatcgtcggcgagtgccgcggcgcggaggcgtacgacatgctgcaggcgatgcagaccgatcatccgggctcgatgacgacggtgcatgccaacgatccgggaaacgccatcagccgtttgcgtacgatggtgggctacgccgacggcgacctcagccgcgacgtcatcgtccagcagattgccgagtcgttgcagggcggcctcgtcgtgcacgtcgaacgcatgcaagacggggcccgccgagtgaccagcatcgtggcgatcgatccgcttcccgaagggagcctcgtcatcccgcgtgccgagctgttcgttttcgacgtcgagggcgtcgatgcgtacggcgccgtcgcgggcgagtggcgcgcgtgcggcgtgcagccccagcgcatcaaggagcgcatgcgcgcatcgggcgtatggtacgaccccgcttggtttttcgatcgatgaggagggctgaagcatgataggactcgtgttgccttgggcgctggtggcggcatgcgctgcagcaggcgcttgggcgtacgcgctcgtgcggcaggagcgcgcggcgtatcgcggtcgggtgctgagcgatcgcggtctctacgaagcgggcgaagccgccgcgacggaacggaagaagccgaagcttccgaggctcgcccgcgcgctgcatgaagcgggggtcgagacaccggctgcgaactgggcggcgggcgtcgcggctatcgccttcgtctcgctttcgcttgccgcggcgttgacgggagatccggggatcggggcggtcgtcggcgctgcggccctcgcgacggcgggcgtgcggctgcatgtgcggcgcttacggcgcagggagctgctcgaccggcagctcgcccgcgcgcttccccagatcgcggccagcgtgcgcagctcgctcacgctcgagcgcgcgctgcgcacggccgcgtcgcacgtcgaggacccgcttcgcgaagagctcgcccgcgtgctggccgacacggcgtacgggacgacgctcgcgatggcgttcgagcgcatggcgcgccgaaccgacagccccgacgtgcgctcgctcgccgcagccgtcaggattcagcagcggttcggcggtgcggtcgcgcccgtgctcgacctgatcgccgcgcatgctgcagcgcggctgcgcacgtcgcgcgaactgaagaccgagcttgcgggcacgcgcttggcgaaatggttcgtcgcgctcgccatgccggcgatctttttcatcatgttcgcgacgaatgccgacttctcgcagttctatcgggaacagccgcttggttggatcgtgctgggtgtcgcggggtgctcggaggcgttcgggctgttcgcctgccagcgcatcacggcgatggatcggagccgaaggtgatcgcgggcggagcgggcgcggcggtttgcgcgatgctcgttctgggggcgataggcgggctcgccgcttacgaagcgttcgtgcgctacgcggctcccgcgcgtcgcgacgtcgtcgcgccatcgtcggcgagcgcctcgaaggatggccaccgtgcgggcggcgcgtcgcggcgccgtcgtgcaaccgaggctttcggtgcgttcgctgcgtttctcgataaacgcgttccgctcacgcgcgccgacgtcgaatcgagccgcgatcgtttgagcagggcgggcgtggagcttgaaccggaaacatggaggagcatccgtgtcgtgtccgcgttgggatgcgcggggcttgcaggggtcgccgccgcgggcatgggcttcgaaccgcccgcgttcgcgggcgcggcagcttgctgcgcggcatgcggctggatggctccgtcctgggcgctatcgcgaagggagcgcaaccgaaggagggcgatcgaactcgcgttgcccgacgcgatggagctgctcggcatcgccatcgcggcaggctctccgatcgagcaatgcttccgcgaggtcgcggaaagcatggacggccccctggcacgggaattctcgctcgtcgacagggaggtgaacctgctgggccgttcgcgcgaggaggcgcttgagcacctggggcagcggtgccgcagccaggacgtcagcgcattcaccgcccagctgatgcaggcggtcagccaggggtcgtccttgacggagggtctagctgtccaagcggcgctggcgcgcgagacggcgcaagcggaggcgatggagcgcatccgcaagatgccgacgaagctcgatatcgtgctgtcgctgtgctttctgccgcccacggtcgcgctcgtcgtggttccgacggtggtcaatctgctgaacttcttgaacgattcgatgggatgagggggctttcgtgagacgagcgaacaaagggatggatcctgaaaggcgggtcgtctgcggcatcgcggccgtcgttgcggtcgtggtggcgtccgtcgcgttcttcggctggagggcgtgcgggcgctccgtcgatgccgtaggcgtcgacggagctgcgatcgaactgaaggttaacttgcgatgcgacggctggtcgtccgagaacaccgggctgggagtgttcgtgtcgggtacgcagatcgacggggcgacctgcgacgagcaactcgtgttcgaggggtcgggcgtgcagaccgcctacctcggcgcgggttcgtacgagatcgtcccgcagctcccgtcgctcatgttgcgcgacggcaccgtgctcgccgcaggcgatgcggtcgcgcgcgactacggcgagggctcttccgcagccgacgatctcgagatcgcgtacgcggcgatcgacgcgcgcgacctgtccgaggacgagttgcgcgccgtcgccgattgcagcttcgtcttcgaggacgatgcgaacgcggcgttcgagcgcgctttggagcggaagagcggggaggcggaccatgaagcgtgaggtgcatcgcgtggtgcgcacgctgttggccgccgccgtgcttttgggagccagcttcggcctcgccgccctggagacgggcgaggcgttcgcgtactcgtataggaccacggatacaaagaccatctacaatcgagcttggatcagagcggacgcatcagcgaactacctcgagctcatcggctccgatcccatcggaccgcgcttcgacatgcccagttggaacgcccccggcggcatccattctcgcatcgaggcgtatcggttcgccgtatggagcgccgcgaacggtcaggacgaccttgtctggtacaccggcgacaacggtcgctggacgcgagcgggcgccgtgatgggaagcggcaagctcgacggcagcggcaacggcaacgggttcgggtgcatcgccacctacggttacggatggggaggctccgtcatatcgaagcacggcgggttcgatgcgctcatgtactgccatgtataccttctgaatacggactacggcttgaattgctacgggtccgttgatttctggccgcgcgtcaaaatacagtacgacgcgaacggcggaagcggcgcgccggctgcgcactacaagtacatcggcaccacggcgaacatctcgtcgcagaagcccacaaggacgggttacacgttcgaggggtggtcgacgacgaaaaacggcgcggtgaacatcgcacccggccagaagattggatacgaagactggaaccttctgcagtgcagcaacatcccgcacgattgggcgggaagcagcccgacggcgttcttccgcgacgaggctgctgggcagccgtcgccttcggggtcgaacatcatcccgctgtacgcagtgtggaagccgatatcctacaccgtgtcctacaacggcaacggcgcgacgggcggcagcaccgcgtcgtcgtcgcacgtgtacgacgcggcgcgctctctcacggcgaacggtttccgacgcagctacacgctcacctgcgacgcgcagggaggctcggcaggcgtgaagcggctggactgcacttggggctggaagtcatggaacgagcgtgccgacggaaccggctcgtcgtacgggaacaaggcctccgtcaagaaccttcgcgcgacgacgggaacgacgaacctctacgcgcaatgggacgagggttacgtcgagcttcccgatccggggacgaaatccgattgcacgttcaaggggtggtacgacgctccttcgggcgggtcgttgatcggcaagacgggcgatcgggtttccgtcgcgtcgagcacgacctactatgcgcgatggcagccgtatgcgcgcatcgcctactacgccgacggagccgacggggcggtgttctcggagtcagtcgaggcgggatgcgcgtatcggtcgaacagccaggcgacggcccaggcgacgaaggccgattgcgcgggtttcgacggctggtacctcgacgccgcgtgcacccggcccttcgccgaaggctcgatcgtgcccgaggcgggtctctcgctgtacggacgcaaccgcgtgacggtttcgtacgccctgaccgatcgcaccgtcgcgttgttcgccgaccgagagcttttcgctgacgaggcgcggctcgagccgctcgcccgcatagagccgcctccgtcgcgcgagctgttctacggcgatcgcctttcgttcgatcgggggagcagcgtgtggttccagcagcacgaccgcatgcgcgaggcaacgtgcgaggcgggcgcctacccgacggccgcaggcgagggcgctcccgcccgatcggcccgcatcaccggcaacactgttgcgtacctgcaatggtcggttcccgtgtacgacggcatcgcgctttcctaaaccttacgcttgcgtaatactaacgttggagttatagttcgagaggagcagatcgcatgccgccgaaaccgttcgagatatatcgtcgactgctcagagagggctggcaggacgtcggaggaggcaaaggctctcatcggaagctgaagcggggagaccgaacgatcatgctgccgcttcgtcggaaagagctgccgaagggattatgggagagcatccgcaaaaccgctcggtggcgctgaggtgtgaaaaagcgcgagagaggacgaaccatgcgttacatgtatcctgcgattttcacggagaacgagttggacggctatagcgtgcagttcgtcgatttcgagaacggctacacctgcggtgacgacatggaagatgccgtcgcgatggctgcggaagtcctctggctcctcatcgacgactacctgcagctcgacaagcctctgccgaagccgacgtacccgatcgagcacgaaggcctgctggtcgctctatcggtcgacgtcgataccgagcggggcgtgctgaccacgaagatggcggcgcacctgctcggcgtgagcgatgcccgcgtgcgccagatgatctgctcgggccagcttgccgccaagaagcagggccgcgacaactacgtgtacctttccagcgtgaaggagcgtctgaacaacccgccgaagccgggccgcccgcgcaagagcgaccgcctcgaaagcgtcgcggaaacggcttcgtagcgcgagggctagactccagcagtcaggcaggaacgttctcccggaccgatggcgagggcggggccctcgccatcgaccgacgcggttcccgccctcgctcgtgcgcctacccgtgcgtggcgtgcgccgcagcggcattgcccccggcttccgagctctgcacgcgcagccgtcccgccaccagcgccaccgcgaatatcgccgccgtgaacagcagcatcacgcccatgttctccagaatgggtatcaccgcctccggcgtggccgcgcccatgtcggccgctgcttgcagcgcgcccgtgtaccagtaggcgggcgagaagtgcgccagcatttgcacggacggatccagcaggtcgaacgatatccaggcgccgcccagaaacgagatcaccatgcccaggatgttgcccaaggcgttgctggcgaattctcccacgcccagctgacccagcaggtagcccaccgaaagcgggatcgtggcgaacacgaacgacgccgcgaccatcagcgcgagccccggaccgctgatcatcgacgtagcctcatggaacacggtgaatcccaaacagatcgtccacagccacaccgccgtcatgaccagcaggctgctcgccgccagctgcagcccgtaggacagggacggcagcggcgacacgaggttgcgtcggcgcagatcggtgcggttgagcgtggtcatcatcacgccgacgcacacgatgatggaggcgaacagggtgtaggtgccccattggaggaagaacacgaaccgctgcgcctcggacgaggttccgcccacttccacgctgtccgtttccgccgattcggccatggcctcggctgcgtgctgcacgatatcgccctgcgaagccgatccttcgaggccggcgtacgcgcccgcgatgcccaggtacgaattcaccatctggtccatcaggctgccctcggtggagtagaagctgtacaccgtctcgagcgtcggcagctcgtcgccggtgcgcgcggcttccacgaacgcgtcgccgaacccttccggaacgatgaggatgtacgagctctgacccttggccacggcgtcttgcaacgccatctggctgtcttcgatgggaacttcgatgccctgctcccgcaagtaggccgccaacccgtccgacagcgcgcttccgtcgcgatcgatcacggcgaacttcgtctcgtacggcgagaactcgctgtcgttcgtgccgccgaacgtcaggccgcttgcgatgaacacgcccatcatgctcaggaagccggcgtacacgatgaggtacatcgggtgccgcagcaccgtcttgatcgcggttttaaagacttgcatagcgctgcctccttatgaacagagccgacgcggcgaacagtaccgcagccatggccagcaggatcaggatgtgctcgatcgtgcgctggtaggtgtcgtagtacatgatgctgtagaacgcttgggatatctgcacggccgggttgaccagctgcgccgcgggcaccgccgcgttcacggtatcggccagcttcatcgtgggcgagccgtacagcccggcgaacagcgaggcgaagcacacgatgccggacagcatgccgcccttcacgctttcgtcgatcttcggcagcgagcccagcagcgtgccgaacgccgtcgccgtcaaggccgcggcggcgatcacggcgatgcatatcgcatctcgtccgccgaaatccacgccggcgacgaaccggatgtacagatacgcgatggcgatgcaggcgaacgtcagcacccagctggcggccagcgtcgccgtcagcgtcttcgcgcggctgagcgctcccacggcgcgccgcgcccccagcgcgctcaggttcggctgcgtgcggcagatagcgatcatcccgatctgcccaccgaacagtgccgccatgcccagcaatgcgaagaagtagcgcacggattctttgggcgggttctgcgtgacgtcgatcttctcggtgagatcgccggcgtccagcagcttttccaccgccgccatgtcggccagcgcggcggggttctcggcggcgacgtcttcgatgagcgccgcgttgcgcacgtatccgtcgccgatggtcttcaagatggactggtaggcgctgtccagcgagtcgggcgtgacccccgccttcacgtgcacggtgggcatgccgtcggcgtcaaccgtgaaatacccggccgctccatcgcccgagatgttgaagtagcccgctcctgcggcatcgtttccgctcatgagatcgcgcgcctcctgctcggtggctacgcgcgccacgtcgagcatctggtcggctcccggctccgccagcgtgtcgatcatctccgagaaccccggcgccgcgtcgtagttctcgtcggccaccaccgcggtggggatgggctcgaactgccccgcctcgtccaggttcgcgaacatgaacacgaacatcgtggacaggatcaggggaaacgccagcgaccagatgaacacgctcttctcgcgcaccagcgcgagcagtgcgcctttgaatacgttgaacatgatgtccgccccctaatcgcgcagctcggtgccggtgatctcgaggaacacgtcgttcagcgtcggcggctcggcgtagatgcgcccgaactgcgcgccgtcacgctgcagcacggccagcacgtcgcttacgttgtgcgtgccgttctggcaagccagttccagcgtgccttcgcggtagagcgtgcgggtgacatggggcaacgcgtccaggcgcgccaacgtggcttcgtccagctcgggcacgtcgatctggatcttctcgcccgtgccgatcatggccttgagctcggcgttcgtgcccgtggccagcgcctggccgtggtccatgatcatgatgcgcgtgcagatctcctcgacttcctccatgtagtggctcgtgtacaccacggtggagccttggcggttcatattctggatgccttcgaggatggcgttgcggctttgcgggtccacggccacggtaggctcgtcgaagaagatgagctcgggcttgtgcgcgatgccgcatgcgatgttcaggcgacgcagcaggccgcccgagagtttccgcgggcggaacttctcgtagtcctccaggccgacgaacgcgatggcctcgtcaacaaggtcgcggcgcttcgcgcggtcgttcacatacagcgcgcagaagtagtcgatgttctcgcgcacggtcagctcctcgaacacggccacgttctgcggcacgatgccgatcctgcgcttcaaatcgtagctggacgggcgcatggtctggccgaacaactcgatagtgcccttgtcgtaggtcagcagctgcaggatgcagttgatggcggtggtcttgcccgacccgttcggtcctaaaaggccgaacacttcgcccgattcgatgtgcaggctgaaatgatcgagcgccagcacctcgttgtagcgcttgaccaagttgtcgacggctacgatgttcatggttcctcctcgtggcggttccgttccgcgatttcgttgtcggcaccatcatgcccctgtagcggtttccacgtaagtgtgcggcgtcatcggtctcaaccggagccatgacatttgtcatggacctcgtccggttcgtcattttgtcgcgtcctcgtgccgcgctgcgccttgccgcccgctatactgatggccatggatcgggttatcgacgaaatcatcctcgttgcgctgtgcttgctgcttttgccgttcgcggcgttctccggcgcgcatgtcgcggcgctcctgtgcgccatcgtggtggcgtgctgcttcgacgtgtacccgcatgcgcggcttcgcttcgcggcggcgggcgcgtacgagctggcggcgctgttcgtcccggagttctccgcgttgctgccggtcgtcgcgtacgtgctgttcggcgagcggttctggctcgtgcggctgtcctggatcatgccgctggcggccgcgctgcgcacccaggacgttctgctcgtccccgcggccgtgctgtgcgcggctgcctgcctcatggcgtggcgcacgaaacgcgcgggcgaggagcgcgagcgctaccgcgccctgcgcgacgagcagcaggaggcgtcgctgtcgcttgcgaacaagaaccgcgagctcatggccgcgtaggactacgaggtgcgcttggccaccctgtccgagcgcagccgcatcgcccgcgagatacacgacaacgtgggtcatctgctcacaagatcggtgctgcaggtggaggcgttgcaagtggtgcacgccgacgacgagtgcgttcgcggcgggctggcatcggtgggcgcgacgttgcacgaggtcatggacacggtgcgcaaaagcgtgcacgacctgcacgacgatgcgttcgatctacgcgcgcgtctggaaggcgtcatcggcgcctgcggcttggacgacgtgcgcctcgtgtacgacgtccaggatgtgccgcttcccgtcgcctacggcgtggtggccgtcgtccgcgaggcgctgtcgaacgtggcgaagcacagcgacgccacgcgcgtcgacgtgtcggtcatcgaatacccggctctctaccagctcatcgtgcaggataacggttcgcgcgacggtgcacgttctacggcggtggatgtcccgaccgcgcaggccggcatcggtttgcagacgatggaggagcgtgtgagctcgctgggcgggcgcctgcgcaccggctaccgcaaaggcttccgcgtgttcgccaccgtgccgaaagaaccgtcgaaggagaaatcatgatcaggacgcttatcgtcgatgacgacccgttcgttcggatgtcgctgcagaccatcctcgaagcgcaggacgacgtggaggtgtgcgcgctcggcgccgacggcgacgaggcggtcgagctgttcgagcgcgaacggcccgacgtgttgctcatggacatccagatgccgggctccgatggcctcggcgcggccgagcgcatcctgggcgcgcacaagcacgcgcgcatcgtgttcctcaccacgttctccgacgatgagtacatcgtgcgcgccctgcgcctgggggcgaagggctacctcatcaagcaggaagtggccaccatcgcgccggccttgcgcacggtcatggccggtcagagcgtgcttggcggcgaggtgcttgatcgcatggacgtccttatgagtcgaggacccgcatgcgcggagaacgcgccgggcggcgagatgcgcagcggcctcaccgagcgcgaatctgccatcgtggagctggtggccgagggtctcgataacaaggagatcgccgccaggctgtacctcagcgagggcacggtgcgcaaccacatcagcgccatcctccagaagctcgatctgaagaatcgcacccagctggtcgtccgctactaccgcgaccgctgaatgagacaggggaatgagacaaagggacgggggctacttgaacgccgcttcgaacagctcctcggcttctttctgcagcttctcttcgatggcgaggtacgtatccaaaagcttgttgccggcttcggtcaggtcgctgccgtgagcgccgtcgcggttcagcagctgcaagtcgagcgccgcctcggtgtccttgatgatgcgccaggccttgctgtaggccatgcccatgcccttggcagcggcgttgagcgagccggtttcgcgcacgcccaggcacaggctggcgatgccgcggccgaacagagagccgctttcggcatccgggttcatgatggaaagcctgatcgtcggcttcaggttcgcaaggtcgctcatgggattccgtcctttgcttgttgcttgcgcatgcatgcgcgtcagtcgtccaggtgctcgaggaaacgcagtgccgccgcctcgatgtcgttcgtgccgccgtcgatgacctcgtcgaagcggatgggaagcgcgtccagctcagccaggccgtgggggatgtcgtcgacgcccgtctcgcgcgcgatcagctcgttcagcttgcagcccgacagcgcggccacgtcgtcgggcagcggcgcgccaggctcgatgccgtgcagcgcgcggtacacgttgtcgccgaacttggcccagtgcgccgtgctcgcgatgagcacggggttctcgccccgaaggttctcggcggtctggtaggccacggccgtgtgcgggtccaacaggtagccgtgctgctcgaacacgcgcttgatggtgtccaggcacgtggcgttgtcgatggagtccgacgcgaacagctcccgcacgcgggcgaaggtctcttcgtccacgcggaagcggcgctgcccgcgcaggtcggccatccagccggctatggcggcggcgtcgcgtcccgtgagctcgaacagctgacgctccaggttcgacgaaacgaggatgtccatggacggcgagggcgtcagcacgaaggggcgctcggatatgtcgtaggtgcccgtgttgatgaagtcggtgagcacgcggttctcgttgctggcgcagtacagcatgcccagcggcacgcccatgcgcttggcgtagtaggcggccaggatgttgccgaagttgcccgtgggcacgcatacgtccagctcgtcgcccaggttcagtttgccgtcggccgccagctgcgcgtaggccgacacgtagtacacgatctggggcatgaggcgcccccagttgatggagttcgcgctggaaagagcgatgcggtgctcgtcctgcagcttcttcgcaaaggcctcgtcgccgaacacgtttttcgcgcccgtctggcagtcgtcgaagtttccgcgcacgccccatacctgcacgttgcgcccgcgctgcgtggccatctgcttgaactggatgtcgctcacgccgccgtcggggtacatgacgccgatggacacgccgtccacgtcgcggaagccctcgagcgcggctttgcccgtgtctcccgaggtggctaccaggatgaggaagtcgtggtcgagcttgccctgctcgcgcagctgggcggcgcttgcggagaagaaacgcggcaggcactgcagcgccatgtccttgaacgcgctcgtggggccgtgccatagctccagcacgtgggtgtcggccgaaagcgacgtgatggggcagatgcgctcgtcgtcgaagttgtcgccgtaagcctgggccataagcgcttcgacggtttcggcgggcagatccacgtcgaacgcccgatagatgcgcgccgcgcgctgggcgtacggcagctcggccagcgctccgatctcgtcgagggaaagctcggggatgcgttcgggcacgtacaagccgccgcccgcggccaggccgtcgatgacggcttccgtaaaggtgacggggcgctcgctttgcccgcgcgtgtcggagtagaggttttgagccatgtcctgcactttcatccgtgttccgccgaactggtatcgcgtctcagtatactatgctgggaattgtcccggcggcagaatcggcggaggatcttcacgcaatttgcaagcggccgcgttcccgccctgcttgctcgacctgggtttccaggcgccttccgttccgtaacgaatcaacctgcgccccgctgccgcggcgaagcccggtacgctgagcgtcgtatgcgttacggaagcgaggtgcagacgatgggcgagcccgcgaacagaggacgacgatcctcctccggcggcatgatgatgcacggagtgaacctcaagcggcggttcttcgtgagcctcgtgctggcggttcccatcctgctgctgtcgtcgccgatggggctcgcgctgcccatcacgctgtcgtttcccggctcggactggctcgtggccgcgctggccacggtgctgttcgtctacggcggctggccgtttctgcgcggcgcggcggacgaggtgcgcaaccgcaagcccgccatgatgacgctcgtggcgctcggcatcaccacggcctacgtctacagcatgtacgcgttcgccatgggcagcgtcgcgcacgacggcggcatgcacatggacttcttctgggaattggccacgctcatcgtcatcatgctgctgggccattggatcgagatgcgagccgtcatgggcgcaggggacgcgctcaaggagatggccgaactgctgccggcgcaggcgcacgtgaagcaggcggacggctccttcgccgacgtgccgctcgacgaggtgcaggtgggtcaaaccgtcatggtggaggcgggggagaaggtgcccgccgacggcgaggtgacggacggctcgtcgtccgtcaacgaggcgctcgtcacgggcgaggcgcgcgccgtggaggcgcatgagggcgacacggtgttcggcggctcgcagaacggcgacggcacgctgtacgtgcgcgtcaccggaaccggccagtcgggctacctcgcccaggtcatgcagctcgtctcgcaggcgcagcaggagaaatcgcgcgccgaggtgctgtccgacaaggtggcgcgctggctgttctacgccgccgtgagcgttggtctcgtcgcgttcgtcgcgtggctcgccgtcaccggcagcgtgtcggacgcgctcacgcgcatggtcaccgtgttcgtcatcgcgtgcccgcacgcgctgggcctggccattccgctcgtggcggcgcgctcgacctcgctcggcgcgcgcaacggcctgctcgtgcgccgccgacgcgccctcgaggtggcgccgcgggtgaacgtggtgatgatggacaagacgggcacgctcaccgagggcgacttccgcgtggccgaggtgcgcgcggtggggaagcggagcgcccccgccggtgacgcctccgacgcccccaacgtccccggcgcccccgccgacgatcgcgcgctcgcgctcatagcgggcctcgagcagtcgtcgtcgcacccgctggccgccagcatcgtggccgccgcgcagcagcgcggcgtgcagcctgcggccgtgcgcgacgtgcaggccgtggcgggcgtcggcgtgaagggcgtgcttgaaaatggctcgcacgccctcatcgcgaacgcgcgctatctggacgagcagcgcatcccctacgatcgttccgccttcgaccagctggcaggccgtggcctcaccgtcagctacctcgtgatcgacggcgaggtgcgcggcgtggtggcgcagggcgaccagatcaagcccaccgcccgcgaggcggtgcgacagctcaaggcgcgcggcatcgcgcccgtgatgctcaccggcgacaacgaggcggcggcccgcgccgtggcgcacacgctcggcatcgacgagttccgcgccggcttgctgccccaggacaaggtgcagctcgtgcagcagcgccgcgatgcgggcgacgtggtgatgatggtgggcgacggcatcaacgacgcgccggcgctggcccgcgccgacgtgggcgtggccatcggcgcgggcaccgacgtcgccatcgactccgccgacgtcgtgctcgtgaaaagcgaccccgaggacatcgtgcgcctgctcgacctcggcacgaacaccacgcgcaagatcaagcagaacctctggtggggcgccggctacaacatcgtggccatcccgctggcggccggcgtcctcgcgccggtgggcatcctgctcagccccgccgtgggcgcggtcctcatgagcctgtccaccgtcatcgtcgccgtcaacgcgatgaccctcaaaaacaaatgaggcgaccgcgccccgcgccctgcagcgtcctcgtcccagtccaacaatatgcggaaaatgttagctaaggcttccattccccgagagtttgctataagatacttttgttacatgaagctaactcgatgggagtcaccatggacaacgcaacggttgcgagcatgcagggaacggtcggtcgtacggacgcagggtctgcgccgggcatcgcctgccagcagatgccgctttcgttcctgaagggcggcgagacgggcaccatcgcgaaggtgcgcggtcgcggcgatctgcatcatcatctggagaacctcggcttcgtcgagggcgcgcaggtgacggtggtgtccgaggctgccggcgacctcatcgtcgaggtcaagggcatccaggtcgcgctcaaccgccaggtcgcggcgcatatcatcacgaacgccgccgcgtagcacctccgcaagccacgcacgagcacgaacggatgtttcacgtgaagcatctgccgtgccgtttggcgtgcgcgcatcgagttggcatcaccgcaaggaacctcaaggaaaggaaacggggcatatggcagaagttcaagatcgaacgctgcgcgacgtggccatcggcgacaccgccaccgtccgtcgcctgacgggcgagggcgcgctcaagcgtcacatcatggacatgggcatcaccaaggggacgagcgtgttcgttcgcaaagtcgcgccgctgggcgatccgatcgaggtcacggtgcgcggatacgagctgtcgctgcgcaagagcgaggcggagagcatcctcatcggctgacgttgccaggcgtgagcgccaggtgacgaggatagaggcgccgcggcgcttcttttttgggactgagttagtagcagctaacttaaaaacgagccaacgggggattgcagacccccgaccggcttcgaagcagatggaaaggctgatcatgggaattcgcatagcgcttgccggcaacccgaactgcggcaagacgacgatgttcaacgatctgaccggcgccagccaatacgttggcaactggccgggcgtgaccgttgagaaaaaggaagggaagtacacccgcgacaaagacgtgatcatcacggacttgccgggcgtgtactcgctgtcgccgtactctcccgaggagatcgtgacgcgcgactacctgttggacggcggccccgacgtcgtcgtgaacctcgtggacgcgacgaacctcgagcgcaacctgtacctgaccacgcagatcctcgatctgggcgtgcccgtcgtggtggcgctcaacatgatggacctcgtgaagaagagcggcgacaagatcgacgtggccggcctgtcgaagcagctgggctgccccatcgtcgagacgacggcgctcaaggggcacggcatggccgagctcatggaaaccgccgtcaaggcggcgaaggccggcaagcccgccgagccgaagatgcccttcgacgcgcaggtggaagaagccatcacgaagatcgagggcattctgggcaaccgcgtgtctccggcaaccgcgcgctggttcgccatcaagctgttcgagggcgaggagcgcaccgtcgccaacatgaagctcagcgccgccgacctcaaggcggtcgaggcgattcgcgaagaggtggagaacaagctcgacgacgatgccgagagcatcatcacgtccgagcgctacaacgccatcacgcacgtcatcgacaagacgatgaagcgctcgcacaagggcatgaccaccacgcagaagatcgaccgcgtggtgacgaaccgttggctgggcctgcccatcttcgtggtggtcatggcgctcgtgtactacctggccatctccgtgggcacgggcgtggtcaccgactgggccaacgacggcatctccggcgacggcttcctgtacaccggcggcgcggcctacgaagaggccgtgggcgaatgggaaggcgagcaggccaacatcgaagcctacctcgccgctgctgaggaagacggcatcgacgtggagggcgcgaccgcggccctcgaagccgaagagcccaccgctgccgacgaaagcgccctcgccgcattccaggaggatgccgagaaggccggcgtcgtcggcatcgtcgaggacgaggagaccggcgaatccgccgaggtggacgccgcggcctttgcaaccgccctcgaagctgaagagcccgacgcttccgacggctcgtggggcctgtggattcccggtttgggagcggtcatcggcaacgccctcgaggcggtcgacgtcgcgccgtggctgcagagcctcgtgatggacggcatcgtcgcgggcgtcggcgccgtgatcggcttcattccccagatgatcatcctgttcctgctgctcgcgctgctcgaagggtgcggctacctggcgcgcgtcgcgttcatcatggaccgtgtcttccgccgcttcggcctgtcgggcaagagcttcatcccgatgctcgtcgcgtccggctgcggcgtgcccgccgtcacggccacgaagaccatcgagaacgagaaagaccgtcgcatgaccatcatgacgacgacgatgatcccctgcggcgcgaagatgcccatcatcgcgctcgtgttcggtgccatcgccggcggcaacaccgaggctacctggtggatcgccccgctgttctacttcctgggcgtcatcgccatcatcatctccggcatcatgctgaagaagaccaagatgttcgccggccccacctcgccgttcgtcatggagcttccttcctaccacatgcccacggtgaaatccatcctgatgtccacgtgggaccgcatcaagggctacatcgtcaaggcaggtacgatcatcttcctgtccaccatcgtcatctggctgctcatgaacttcggtgacgcgggcgagggcttcggcttgctcgataccgagatggacgactacatccagtacagcctcatggcgggcctgggcaacggcatcggctggatcttcgcgccgcttggcttcggagactggcaggcaaccgtcacgtccatcaccggcctcgtggcgaaggagaacgtcgtcgccaccgtcggcatcctgaccagcctgggcgatgtgggcgaagccgatcccaccatgtgggccgcgttcgccgccctctttgcgggctcggtgccggccatcctcgccttctgcgccttcaacctgctgtgcgcgccgtgcttcgccgccatcggcaccatctggcgcgagatgggcaccgcgaagtggacctggttcaccatcggctacatgaccatcttcgcgtggtgcgtgggattgatgttctaccagttcggcggcttgcttaccggcgagatcggcttcaacgtgtggacggtcgtggccatcgtggtcctggccggcatgctgttccagattttccgccccatgcccaccttcgacaagaagaaggacaaggtcgcgggcgagcttgaagccgagggcagcgtcgcgtaggcgaagcggcttcgggcccgagggaaccccctcgggcctgtgccccgatgttccgagaaaggacgcgctatgtttggtttggagttcacgccgtctacggtggtcgtcgcgctcatcgtgctggcgctcgtgttcctcgcggttcgccgcttggtgcgcaacggcatgtgcgattgccataagggagacgacgcgcacggcggatgcgccggaggatgcggcggctgctcgggctgcggcgctgccagcgccatggtggccgacatgcagaagcgagccgctgcggagtcgcaccgctaaccgccccatacgcagagcgtcgtaacgcgatcaacgaacggatgtttcacgtgaaacatccgtttcgtcgtttacgggggcagagggcacgggggcaggggagcggggatgccgtggtcgccccccccccccactctctctccgtagccgcccctccctccgatatgtggaggaattgtaaaccatggtaaacttctattgccccgcagcaaaagttatcgtagactaacaattgtcagcggggccgaggaaatcgaacccgcaggcacctcctctttttgctgacacggtggtggggactctcctctcgtctggtcgtccaccacacagcacgccggcgagggacccccttccctcgccggctcctccaacaccccttgcaccgccatccggtttcaactggttccgcctgtcgtgtggtaccatggaacgacgaacaaaaggagggttccgtggaaaaaatgtccatgtcgcacgaggactaccttgaagccatcgtgatgctgggaggcacgacggaggtgtcggtcaggtcggtcgacatcgcgacgaagctcgacgtgtcgaaggcctcggtcaacaaagcgatcagctcgctcaaggaaaagggtcttgccgaccagccctattacggcgacatcacgctcaccgaagaagggtacgcctacggcatgtcggtcctcgaccgccatcacatgctgttcacgttcctcacgaaggcgctcggcatccccgaggagcaggccgagaaggaagcctgcctcatggagcacgccatcagcgacgaatcgttcaaaaaatggagttcttatattaacaagctcgacctgtaagcgggtttcgccccgctttccctgaccgttttcctcggtcacgcgagcattcaacaagttcttaacgacgcgcccgcccgccccgccctcggtggcagggcgggcgtcggtgtggtatgctttccccagcttctgcattaaacaaaccaaacacgaaacacgatgcacagaggagcccctttccttggcaacgcagccttatattctctcgtttgacgaggcgaaacgcgacacccgtgcgcgccgcccctcttctgctgcgcccgaatcgcgtcccgtgatccattccgtcgatgccatccccgcattcgagtcgcccttccgccaggcaggcgaggggcgggggagcgcgcgaacggcggcgcacgcgcgcccgtcgggcgctgcgcggcgatcgtccgcgggagccggcgacggttcgttcgcccgcatatcgacgttcgatcgtcccgcaggccgtcatgcggcgccgcgtccggcgtcgtcgagctcgcgccgtgcatcgagctcgtacggcacgggccgcttctcctcgttcgacgagcgcatcgaggaacagcccgaagaggaagtcgaagagcgccgcctgacccgcaaggagcagcgcaagaaggcgcgcgccaagagcaaggccgagcgcgcgttcaccaagcagttcggcggctcgaagccgtccgatgcctcgcaatcgggcccgcgcgccgcggtgtacaagggcgagatgggcgcgaagcaccgtcaggccgcgcgcatgcagaacgcggagagcccgcaggcttcggcgaagcgcggcttctcgctgggatcgctcgcatcgctcaagtcgtcgccgaagttcatcgcgagcgcggccgtcgccgtctgcctcgtgctctcgtgcgccttcctgtacccgccggcgcagcagtactaccatgcgctgcgcgagcgcgaccagctggccgccgagtatgcggcgctcgaggagcgcaacggcgccctcgaaagcgacgtctcgtcgctgcagaccgacgccggcatcgaggatcgcgcccacgagcagttcggatgggtgaagaagggcgaggagacggcgaacgtgcgcggcctcgaccttgacgaggacgaggcatccacgttccgcgccaacatcacgccgggcagcgtcgaggcgccggagacgtggtactcgccgttcctggacgccctgttcggcgtcgagtagaccgagggaaggggtcgccatgagcgccatcgcggagcccgagagtaccgaaagcggtttccaggcgggccgatacgcggccatcgacatcggcaccgtgacgtgccgcatgctcgtggccgacgtggacgaggcggggcggctccatgagctcgaccgcgagtacaccatcacgaacctcggcgagggcgtggacgcgacgggcgtgctgaagcccgcggccatgcagcgcgtggccgatgccgtggcgcgcttcctcgacgtgctgcgcgggttcgccacgccggaacatcccgccatcacgacgagggccatggccacgtcggccgcgcgcgacgcgcgcaacgccgacgagttcgaggcgctgatggcgggcttgggcgtcacgctgtccgtcatccccggcgagcgcgaggcggccctctccttcgcgggcgcgtcgtgcgacttccggggggagcgcctgctcgtggtggacatcggcggcggctcgaccgaggtcatcgccgggcgcgcgggcagccggcccgatcgctcgcactccttcaacatcggatgccgtcgcgtgacggagaagttcttcgcggccgatcctcccggcgccggcgagctcgaacgggcccgcgcgtgggtggaggaggggatgcgcccctacttcgacgagctgcgcggggcgggcttcgcacccgagcggctggtggcggtggccggcacggccaccacggtggtgtcgatccacgagcgcatggaggtgtacgacacctcccgcgtgcataaggccgtcatcacgcgccccatgctcgacggggtggccgaccagctggaacgcgtcccgctcgcgcagcgcgagcgcatcgtcgggctcgatccgggccgcgcgcccgtcatcgtggccggcatggtgatcctgcagacggtgctcgacctggccggcgtcgattcgttcacggtcagcgaatcggacattctccacggcatcattttggacgaagcggcgcgctgaggtcccgccgtccgataaagtttgctaccatagggcctgctcgttttcagcgggccgtcgcacgcgggggcgtggcggaattggcatacgcaggagacttaaaatcttccggcttcggccttgcgggttcgagtcccgccgcccctaccaagaacgatgaacaggggaaacgttaaggatatcaaaacgtttcccctgttgttcaagacggcctattgtccgaaattgtccgaagtgcgcgtaaattgtcgccaattgtcgggaaattacgctaaaaactcgctgcgcacccacccttccgctccatacaaaacgcggcaccattcctcgtcgcgctcgagcacgtcgcattcggcgccgcggggcaggacgtggatcacgttgccgttctgctcgtcgcgcatgttcaggccgtgcgccgccgatacgacggctcggtcgtgaccgatctcctcggaccgctcgccatcgtcggaaccgtcccaggcttgcggagagccgttctcggctgccgtttcgaccttgtcggcatgcgtctgcgattcggtcgcatgcgaggcgtacaacgtctccagctcggccaatttcgcatccttgccgtactccacgcccatctcgtccaggatccgcttgatctcgtctttggtcatgtttcgtcctttcttagcccagcaccatgtccccgccctcggcggtcggcacctcgccggagatcatcgcccccgacgcgccgaatgcgtaccacttgccgccgatgctgcggcacgtggactcggccatggcgccggagtcgtccagccagtaccaggtgccgccaagcttcagccagccggtctgcatggcgcccgaaccgtcgagccagtaccattttccgtccaccttgcgccagccggtggccatcgcgccggagtcgtccaggtagtaccacttgcccccgacgagctgccagcccgtgagcatgcggcagtcgtcgccgagcaggtaccacttgccgccgacctcgcgccagccggtcgcggcgtagccgtcgtcgtcgaaccggtaccacgcgtcgagcagcagccactcgcccgccggccacgagccgtcggcgcggcggtaccaccagcccttcgcgtccttgacccactcgccgcccgacgcgccgccgaccacggcgtcggcgatggcgcgcgcgacggcggcaggccccacgcggttgtaggcggcctcgtccgcgcggctgtccacgaagcacacctcgacgagcaccgccgtcatgtccgtgccgttgagccagccgaggtcgccgcgctgcttcgcgccccggttcgggatgcgcatgagcgaggcgagcgcggagctgatcctcgcggcgacgcgctcgccctcgccgcccgcgctcgccgggtggtacagcgcctcgcagcccgtgccgccgcccgcgttgaaatggatcgagatggcgagcgccgcgccgctcgcgttggcgcgcgcaacctgggcgtccagctcctcggggtacggcatccggtcgtcggccgtgcagtcggtcacggcatggccgcgcgcgcggagctcggcgatgagcgcgtccttgaccgcgcggtcgcagcgcacctcgtcgaggtacttgcccgcgccggggctggtcggcgtgtgcccgccgttgacggtgatcctcatcgtcactccttgccgttgaggccgtcgaggtaacgctgcgcgtcctgcgcggcctcggtcacgttgttgtttcgccaccaggccacgacggtcgtgccgatagccagcactgccgccacggcgctggtgagcgcgtccgcgtccactgcgccgaacgtgattgcgaacacgagtgccagcgcgcccagcgccaccgccagggtgctgatagccttgatctgctccttgttcattcctgctccgatctctagatgtttatgccgagatgagttgccacgatcccgaccacgaacgcgagaaccgccgtgagggcgtagttgacgacgctgtcccatctcttcgcgggcgcagcctccagagccgctatgcgctcctcggcggccgtctgccaggctgtgttggcctcttgtatcgcggtgagcctgacaacgcactcgcgcagctcgtcgatctccccgccgtgcgcctcgaggcgcttgtcgtgcagcgcgatggcccgctcatgggccgaatgctcgaggcactggtccaaccggatcacctcctgtcgtgtacgccgctttccgtctgcgccatagtcccgcacgagtcacctgatcccggaaaatcccaagcgcgcttatgattggaaacgcgcgaaaagcgcctgggatttttgagtcgaaaaggagccgagccatgaacatcgcggagatctacgagagccactacctgccggagaagtcgaagaagcgccgcccctcgaccgtggcgggatacgacagctcggtgcgcctccacgtgctgccgaggtggggttcgtgcgagatcgaggacatcgatcccgacgacctgcaggagtgggtggacgggttcgatcgtgccggcgccgccgagaaagcctacaagtgcctgcgccagatcgtgcggtggtggattagggcaaagcgcctgcatatccccgatccgaccctctacgtcgagctgccggcgaaggagccgtaccgtcccgacgtgctggacgcggaaggcgtcacggccatgctgcgcggcatgtggggccatgccatggaggccgttgccatctgctccgtgacgatggggctccggaggggcgaggcgtgcgcgctcacgtggggggacatcaatctcaaaacaggcgaggttcgcgtgagcaagtcgcggcagtgcgtgggcggagaggtcgtgaccgagggcacgaaaaccgacaagtcaacgaggtcatgctaccttcccaggttcgccatcaaccgcttgcgccagatcaggggcaagggcctcatcaccggagacgtgtcgcccgacaaggttgcgcgctcgatcaagtcgtggtgcaaacgcatgcgcctgccgcacgtcagcatgaccaatctgcgccatacctgggcgacgctcgctatagaggccggcatcggcatcgagacggtcgccatgatgctagggcacaccgacatatcgacggcgtacgaccactacatagtcccgcgccgcgctatctgcgtcgccgctcaggacgccgtggagactctgctggtcaagagcgcgggcaagccaaggaagatgctgctggccgcatagttttccgtatcccatatacaatccggcaggctgatggtcatgtcgagcgctaaagctgtagtcgagaaacgcgtcgatttcaaaacgcctttttccgatgtacccgttgtggtcgtcaacgcaaactcggcaacgccaaacgacgttgacgtcaacgcagggagcgtggacgcaaacggatttagtgtgtttctgtatcgcggaaccaacacaaacacgcacgttgcatggctggccgtcctctagcctagctttccgtatcccaggtagcggaagctgcacccgctaccggcacgggaaaggttcggttcgtccggtacgggacgctcgtcgtcggcttcgcgaacgtctccggcacgtcgatcggaacgtccggagccaagctatgcgtcatacccgagatagcgaggccgcgaagctggcagcgtctgccaatcagcggagacagcgttaatgcggctgcagaggtgtcgtcagacggcacgatgaaagtatggagcatggaggcggaaaagactttgacgcgtttaataagcacgttctcgtactacctgatataggcatagctttccgtatcccatggcgtgatgaaagcgaacgaggccccgccgaatgggacgagcatgacgcatgtcgcgttcggagagccgtacaaatcaaaaccagccgtagtagcgtcgctggatgcggagctgacgtacgtgtacggatccgtgacggtctgcgcgtgcaacgttgcgacggacggcttcgatatctgcgtcgccaacgcctcgcaaggccctcgcggccctcgggtcgcatggatcgccgttccgtgacgagcgcggaaagctatacgccccatacttcgcgcaaaacgaatgctctgttatcgtacaccacccccgaagcgccggtccccgaggcatcgttcctctcgtgcccgaccaggctgttctcgttgatgtaaacgtacttgtccgcgaagctgctgaaccactgcgtggctaggaaaaaattgtggccaaagccgttatgactggaaacgacctccttaggtacaatgaagctgtggaagttgtaatcctgcgccaccccgtccgcatacgccgaccaaacgagcatgattcctgtggagtacgcgttgacgcccttcgggatctgaatcgactgcgtagcccgcatgaagaacgctcccgaccatatcagctcgcgctgggatacggaaagctacgccaaaaaaaacacggcttggccgtgagcataggctcccttctgcgacatcgtgatggcggaagcgcccctgtttcgcagaaaagccctggatccttcgaccgtgacgtcaagagtcgcctctccgtagctttcgaccgccacgacgccgaacgcagtcttagccgcagcgatgccggtcggcagctcactgttttcgagggtttgccacggctgcattgtcccggtgatgatcagctcgacatccagcacggcaattttgccgtatgtttgcaatgtggcccagttgccaacagcggcctgggatacggaatcccaggcatccttcgccgaaacgaattcctggaacagctgcaccggcgtgccgaccgtgatgccgttaagggggatgcgccacaggggcatgtcgttcgtcagcgcgttgccgttgaggatgtcgccgcgcgtgtacgacgggtcggccggcgtgccggtcgtgggcgtgcccttgatgacgacgaggctcacggactcgacgcccgtggatgcgttcttggcgtagcgggccaccaccaggtcgttgcgtttctggccctgcgtgccggtctgcaccgtcaggtcgactccagccgcgtcgacccagaaatggcgaccctgcatcatggcgttgcccgacgagatgtgcaccttgttcgacgatgccatggtggccttgagcttgtcgtccttgacgcccgcgaacacgtactcgccggggccgagcgcccccgcgttgaacttcgccacgtcgagggacgagatatgcgccttgcccgtgaagccggttaccagctcgatgcccattattgcgctccttccaggtacgagttcacggccttgtcgttggcctcggccacggccttgtagccggggtagcagtcggggcacagcgtgatggtcgcctccacgccgtcggcggtcaggcgcttcaccgtcttccaggatcccgtgcggggatcgttgccctgcaggtactcgaccgtgtcgcacgtcttgcggtcgcacgcgagcctgctgtatccgtccgtcttggccatggggcctcccttacttcgtgcgcttccatttgtacggcccgaggctgggctcctgctgccaggtgccgccccaggccgtggggttggttccgtcggtctccatgtacgagccgacccggtgggctgccaggaacatggcctggtcggtcggcgggatcgccttcagcacgccgttgccgtccaccgtggtggtcgtgccgtccggcctgaccgcccctatcgccgtggaggtcgccttgtccatcgcctgattgggatgcacgtggtccgcgttggccacgatgccgttggccgtgccggcggaggccgtcccgttcgcagccgcggccgacgacgagagcttgacgtgcccgtagctgccggacgaagccgctccgtacgaggtgtcggccgacgcgtggctcttgggggctagcgtcgatttcagcttggcgaccaggtaccggagcccgtcgtcggtcaacgctttgatggacatgggggcgcccttagaacatcgcgtcgatgtcggcgttggtcacggtcgagaggtctgcgctcttgaggtagggcgacaggtcgaccatgcccgccagcacgtcccacatgtacgtggttcccgacgtgttgacgcacaccacgttggtgcccttagggtacgtttgacctgctccctcgacgaatgacgccgtcgtggtgaacgcgttggtgacgttgtagaccttgccgaggtttgccttcgacggcgcggggaggctcgcgaaggcgatggatccggctggtttgtaggtggagctcacggcgctctcgatggccgactgcagctcgctcttcgctgccccgacggcgccgtccaccgaggactgcacgtcggcggacgtctggtatccggagtcgttcgtcagctcggacaccttcgcggggacgtggatcgcggccgccttgtcgtcagcgtacttcttcgcgctcgcgagcgtcgccttgtccccggccgcgatatcctcgccgaccgtcgtcgcgaccgcgaagccgctgtcgttcgccagctgggacaccctcgtcggcacgtcggcggccgccgctatgccgaggtcggcgagcgactgggatccctcgagcgtcctgccgtttatcgacggcttcgccgtcaaatcggagtaggagccgctgaacacgtggctgtccgcgttctcgatcttcgcgacgagaccgtcggtcaggttgttgtccgacagcaccttgtactcgctcgacgagcccgtgcgcagctcgcgcggaacgaacagctggcgcagcttctggagaaagtagagcagcccgccttccgacgtcaccttgattgccatagtccggtcctttcggccatcttctcgttgaacatcgactcgatctcgacgtttcccagctcgacgactccgatgtcctcgagcgccatgtccccctcgagcgtcctcccgccgatcgacggcttgccgaccagggcggcgtagtccttggcccctccgtcgacgatcagctgccgcatctcgtccatcagcccgtcgagctcggggcagtacgagcccgactcgcccgcgcccgcgctctcgatcgacggcagcacctcgatcgcgaacgggccggccgagtcgaccgcgccgtctcggaccaggcggaagcaggctccctcgatgaggccctcgacggccgacacctgcggcgggagcacgtactcaaccacgccgccgggcttcgccgccgcctcctcgcgcacccacgtgccgtccggcttgaccgcctcgaacctcgcctgggcgtgcgataggtcggccggctccccgccgtcgaggatatgggcgcgcacgaccgtagcgtcggcgtcgccccgcatcacgcgcacggggggcctgtcccagtcgggcttgcgcaggtcgagccttatgtcgcatacgtgcatccgtcgatcacctcgcagccattaaagcgcccttgtcacccggcgagaggacgcgcctcccgcctcgcacgaggacgtcaccccgcgcctgccgatggtcacgaccttgcgcgctatggtcgccgtcacgaagaccccgagacggctctcgcgccctcccacgacgtcgccgacgtcgaagtccgcgttcggcagctccggcacgtcgcacgtgctcgcgtcctgcagctccttgaggcgtttgatcccctcctgctcgaggtcggcgtcctcggccgagctgtagtcgtaggcgcgctccacctcgtcgatgccgaacatgctctgcgtcttggacacgttgcccgactcgtctgcgtacaggtcgatcacggtcctctgggcgagctcgcccttgcctaggcacacgaggtggttgaccggacggctcgcctgcttgatcttgatcggcgtgcgccggccctcgaactcctcgcgcgaccagtcgcggcgcggcatggccgagagcaccaccttgccgccgtcccagcgcatggcgagcttcgcgccggcggacgcgagcatggcgcgcaggcccgcgtagccggcgacgtagcgcgcgaaccggtagccgacgcggatcccgctgtccgacgcgtcgacggcgaacagctcggcgagtcccatcctgtggacgagctgcagcagcacggcgttggcctcgccggagacggacaggtagtccgcgccccggtccgggcgcagcacgcggccctccagcacgccgtgccacgtgcgccctccgtacacggccttatggatcctgccggtggtgtccgagccgacgtcgtcgacgatccctccgtactcggtgccgtcgacgtagacgagcgagccgaacgtcaggccctcgggcgccgacgcgaccggcatccgcagctcgaacgtattggcgtcgccgcccccgtcgccgaactccatgtccatggtgcagtcgtcgagcgctcgcaggtcgcggcgcgacgcatcggtgcatatcaggagcatggcggcgtgtccctctccgcgtagacggtcagatcccagccgaaggcgttggaccacgacaccgacgatattccggggcggacgcgctcccacatgtactctccggatccctccttgccgcggatgcgcccggcgaacgcgtcggcctcgttcccgtcgacgtcgcgcacggttatcgaccagtcgcgcgagtcggccacgaggatccctccgtcgggcacctcggcctcgacggcgtagcggttgccggcgacgaccacgtaggggtcggtcgcggggccgtacaccacgagcctccactcgcacgggccgtccgcatcgacgtcgatgctgcgcaggggagggttcggcgtgtagtcgtacgggaagccgtacgggaaatcgagctgcgtgccgactacggcgggggagcggtcgggcacgaaggagaactcctgggcgcgcgtccagaccggcctctcggcgaggaggcgcaccagcacctcgcagtacgactcgtccatccaccatcggtcgcgctcgacggccacgggcacgaccgagagccgccagccgcctatgccgattgagccgggaacacccgtcgatgcgtcggctgcgagcaccgagcgcaggcgctcgcgggcggcgaggccgtcctccccgtcggagccctgcaccatgatcggcagctcccgctcggccggatcccgcgtgagcgggccgaccgagccgttctccacctcgtaggccagctcggcgtcgaacagcgtgtgcttgccgtagtggtagaccgactcggggccgagctccagcgtctcgccgaggtggttggcgtactcgatcctcatgtccatctagcccacccccaatgcccttctcgcgccgcgcgcgttggatatcgtcacttcgtccggcgagttgtccgcgatcttgcgcccgaggccgcgatcgagcctgtcgacgcgttcggtgaggcgctccactgcgtcgacgatcctgccggattcgccgccgtcctccttcggcttgcgtcctcgaggcgacgagggcgaggatcccgacctggcgagcgccgcgtcgagcgcgaacgcggcggacgacggagcgccgatgcccgggaagtccggcacgtcgaactccacaggcacctccacggcgggcacgtccatgtccgccgcatcgtacacgtcctcggccatggagcgcatcgcgtcgacggccttgtaggctgcctcgtcgatgcctttggcaaggccctcgtctacgaacacgccgatcttgcggaagagcttcgacgggcttgcgattcccaggaacgacagcaccgcgttgacgccgcccgacacagcgttcaccgccgcgctcacgacggacccggctgcgcggcctatgccgtccaccaggcccatgagcatgttgtagccggccgaggccaggctgccggcgaacgaggcgaccgcgccgggcagctggccgagaagcgaccggagcgcgccgagcagcgaccccgcgatcccgggcacggcctggacgatcatgccgaacagctggccggccgccgatcccaggctgggcatccacgagcccacggtggagagcacctggctgatcagctggggcaaagacgagatcagctgcggcaccatctgcaggaaagccgagaccagagccttgaacagggtgaacccggctttgagcagggtcggtgcgtttttgaccaggattcctaccaatttgctcactaaatcgggcagcagaggggtcagctgggggaccatctcggcgaaggcctcgaccagtgcgatgaagagctgcagccccgcgtccaggagctgcggggccatggcaacgagcatggtcgcgagcgccgtgacgagctggaccaccccgtcgatcagcgccggcatgatcgtcggcaaaatcccgacgacctggagaaacgcctgctggatcgcggagaggaaggcgggcaggttgtccaccacctgcgagaccagcgtggggaggatctgagacgcctgctcagctagaaccggcagattggcggtgatctgctgcatgttggaaacgaaatcgtccgccatcttcttgaggtcggccccgccggcggcggcagccaggccgaggccgagcagcccggtcgcggccgccccgagcacgccggtggccacgaccgcgcccttggcgagcccgccggctgcctgtccgaccttgcccagcgcccccttggccttctcggcggggcccgacaggtcgagcttggctgcgaacgtgtccacggcgttcttggccgactcgccgagcaccgacgtcaagccgccgaccttgtccttgatgggggcgagcttcgctccgacggcatccgagatgcccgagaacttggacgcgatcttgtccttgaccccgctgaacgcctcggcgatgtcgttcttggcgtcgcggaacccgtaggcgagatccgtcgacagctgcttggccgtatcgaacgcggactgcgggatcaggccgtgcgccaggctccgagtgaagtccttcgcggccggcagcgcggctccgaggatcccggacgcgaactcgcccgcgcccttggcggcggatttgagcgtccctgcggcggatgcaaccccggacgcgagcgcgccgatgggacccatggcggcgccgacgagggacacggccttgccaacaatcacgaggccgggtcctgccgccgcgagcgctaccagcgccttaacgatggcggcgaatgtcgcgggatccattttctcgatcccgcccgcgatcttctccagggcgtcgccgactgctgaggccatgggctcgatcgacaagcccgcatcgctccatttctttgatgccgcgtcgatgatcgctgtggcctgctgcacgatgcgggtgagcgaaccgaggaacttcgacgattcggcatcggtggtgccgtactcgccgacgaccgccaggccgaagtttcggatcgaggacgtcatcgagtcgcacgcgcccttgaacgtgttcttcaactcgcccatcatgccgcccattttggcggtttgcccggccatgccgtcggttccgtcctcgatgccctcgacgagcgcctggatggcccagttggcgtccaccgtgccgtcgctgatggccttcttcatgtcctcgattgactggccgctcttgttggccaggatctgcagcgcctgcacgccgttgtcggagagcgaccacaggtcgtctagggacacctggccctgggcctgcatcttgcccagggccgtggtgatggccttgaagccctcctggcccttgccggacgcggccgcggcgtcgccgacggcggtgagggtggggatgacgttgtcggcggccatgcccatggagatgagctgctgcgagctctccagcatgccgtcgaatttgaaaggggtcttcttcgcgaacgtgtagaggtcgccgatcatcttggaggcggcttcgccgctcccgagcatggtttcgaacgcggtttgggccgactcgcggaggctgaggaagctcacggcggtgcccacggccgccgtgccgatgccgacgacgggcgcggtgaccgcggcggtgatgcccttgccgatggactgcaggccgctgccgagcgcggcgacctgcttctgcgtcgacgagacgagggaagagaccgccgcccggtagcgcgacgcgtcgcccgttatgtcgattactacctgtccgtcagacatccaatccccagagcaggctggtgagcctcagccgctcctcttcggtcctcgcaggcagcgccagctcccgctgcctctcgaccagccgccttctcgcgtcgccctcgtactcggacgggtccgcgcccctcgcggccatggccgtcattgtgagcgacgagtcacccaggccgcggaacagcggccagaaccgccaccagtgcatgtcgagcgccggatccgcgaggtcgatgccgtactcgcgttggaagtccgcgatgacgcgcggagcgtcgtagtcccagtcccagagcctggcgcctttcgcggcggccttgccgagcatgcgctttggcttctgcggctcgttgaggttcaagaacccgagcgccgcctggagggcaccggcggggtccgcgttgacggcgccgggcagctcgatcctgcgcactccgtcgtggaccgccccccggccgaagtagatcagcaggatcgcttgcgcgcgccccgcgtcgcccaggtcgggatcgtcggcggcctgcatggctcggatcccggcgcgaaacgacgtggcgatggagacgggcgcgccgcccaccttgacggaggacggcgcgcggccgaggacgatgttgggatccatgcgcctactcggacgattcggcggcgtcccagtcgacgtcgggcaggtacttggccaggttcgcccggaatccctcgtcgacgcggctcttggtcacctcggcgtagaggtaggcgaaaagctccaagccgtcgatgaagtcgaacttgcgagccttgaagatgtcggcgaactgctcgtctccgagcagcgccttgaggtagccgcgcacgtcctgcgcgagcagcgccatgcggccgctgtcgccggccagctgcgcgtaatcgacgcggcccagcttctcgctccacttctgcaccttgtccagcacgtccgcatcgccgaggtttatctcgtacgacttgccctcgatctcgacgtccaccgtgtgctttgaaaaagtgaaacccatgtctaaccctccgtctatcctgatcgtcgtcgtatgcgtaggagggcgcggtgaaaggagtaagcccgcgccctccggaacgccttgctatccctgcgggcccgcctcggggacggacggcgcctgccctgcgggcgcgaacgccttggccgacgcgtcccacgtgccctcgctccacgcctcgtcgctcatgttgaacgtgccggcgctggtcacgggctggccttggttggagttggagtgcgggttcgcggtgaacttgaacgccgccttgtcggcgagcgccttgccggcctcgtcgagcttccaggtgtaaaccttggcgatctcgcagggcacgtcgaggtcgtttcgatgcttgaagatccactcgtcgagctcgccgtcccgcacggtgtccttctccatgttgatggagcaggatcggccgtaggtgagcgtcggcggggtcttccggtcgatccatgccggctcgtaggtcttcgactcgccggactgctcccagctgagcagctcggtcgccttgacccatttcggggcctcgggcgtgccgatgttgatgtaattctcgagctcgtagccccacgcgacgtcttcgttcgccatggacgagcctccttcctatcgctgcgtcttgtatttgaccaccagcgtcacccggtagtcggtggttccgggcgccgcctgcactctcgcgggcagcgtcccggcctcgatctcgcgcaagcgcgctcccgacccgaggtcgagcgagtaccctgcggacggatccgcgagggatcgcacggcggcgcagagcgatcgcaggatctcctgcgcgtcgagccgctcggcggtgtcgtccgccgcctgccgcagcacgagcgcgacgggcagccgccagaccgtcccgccgtcgagatagcgccgctcgatcggatcgccgtcgagcacctgcatcgacacgcacggcagctccgagcggtcggtcggcaggtactcatactcgcaccgcaggccggccggtgaggacagcacgagcgcctcgacggccccgtacagccgctccaccacgtcggcccgatccatgtcaccttccatttgccacgcctcccgccttggtccccgctatcctgatccacttgctgatgttggccgccttcgccgggtcgaaccattgcatgcacgtgcccggccagcgcttgttcggcagcccgtagtattgcgccctggcgtacggcaccgacgcgttgccccagacgagcagcccgtcctccggcacgctctcggtctccgccgtgcccctcaggtgcccgtcgaggtacggcacgtagggcttgcagtcctcgcgggctgcgagcgtcaccccggtcgtgacggcccgctccatgcctttggccttcgcgatggcgcgggacaggtcgcagcttccgagcttcgccgaaaccttcatcgcgccgtcgcctcgtagtggtcgaccgcccgccctcggcgcaccggctccaccgactcgacggcgagcgcctgcggctctgggccgggggacgacgacgcgccgagcatggctcggtcgcccctgcgcggctcccacgacgtgccgcatccgcccgtgccgcgggggacgagcaggcgcgcctcgtccctcgcggagtcctccatgccggagctcttggccctggcctcgatccacctgaccccgcgcaggacgcgcctggcccacacggcgcggcgctcgccgtcctcgccgtcgcggcgccacacggtgacggtgtgcgggtacgcgcggctcacagccaggccccgtagaggatccgacccggcgcctgcgcgagcatgcggtcgatagcccggtccaccgacatcgacgcggcgtccacgaggcgctcggacacgccgccggcggtgtaggacgatgccgccgggtcggctagcgcctcgcaggcggcgcacacggcgcgcttgtacgcgtcgatctcgccgtccggcatcgccgacaggtcgcggtgcgcgatcctctcgtcgacgcgcgcctcggcgtcgggcaggacggcctcgtattcgtcctgcccgagcctgccggatccgcactccgccgagtaccatgcgtatgtcggggcgtggccgagcatcgcctagcctgcggggttcggcgcgggcgttgccgacggggcctcgatggcgcacaccacgatgccgtccatgacctcggcgaacagcttggagccggtgagcacggtcgtcttcgtggtcaggtcgtcgtagtctacggttcgatgcacgccgatgaggccggtcgcgtcggtgacgaactcgaacgccttggccacgtccccgttcttggggttcgtgtagtagaggatgatgttgtccttggccgtcgtgatgaccttgcccttcggcacgccggtgtacaccagcacgtcgtagatgcccaggaacgcctcgaggtaggtcatgccgaacgccgtctgcacggtgacgtccttcttggccaggtactcgccgatgtcctcggggttgacgaagtagaggtagccgctcgcgtcggtgtcctcccacagcacctggttcttggtccagcaggcggcgagcgcgccctgcaggccctcgccggatgccgcgcccgtgccggtgggcaggaagtcgaagaagtccttgcggatgccctcctggacgtcgcgcagcatcttcgcgtcggtgtcctcgaccgcctgctcgtagcccttgtcgttgatggcctcgtaagaggtctgcttgcgccacttcttgagcttgagctcgaagatctcgccgacctcggtcttgtacttggacagggggatgacctcgccctcggcgacgttgccgtcctcaagcttgccggtcaccttgtaggtcttcacgacctggccgggcttcttctcgatcctgcgcgtgatgccgagcagctcggcgagctggttgatgttcgtctcgaatcgcgcggcgaagtcgacggcgctcactttcgcgaagtccgccgccttctgcatgtttgcgtctgcaggcatgttttttctccttactcgaagagatccatgtgctcggcgatcttcgcccggcgctcggccgggtccttgatcgccatgatctcgtccttggtcatcttcttggccgggccgccgggcgtcgccgccgagctgaccacggttttcgcgtcgaacaggtgggggtaggactccttgaccttggcgacatcgaggccggacacgtgcccgtccttggccacgtcgatgccgtccatgtccaggtgggcgatcgcgcccacggtgtcgctgcatcccgcggcgatcagcgcgttctcgaccacgagggacttctcgcgctgcttccacgcgctctcggcggcgtccgccgccttcttggcctcgccttgcgcctcctcgacggcggccttcacgtcgtcctcggtaagggctttggccaggctgtcgttgaggtctttgagctggccctcggcctcctcggcgcgcttcttccaatcgtcgcgctcctgggtgaggcgcgcgttctgcgctttgaggtcgggctcgccctttgcgccgccgtcgccgttcggcttcgggtcggtctgctggcccgcgcccgcggggtcggtgttgggatcctggttggccatcctgctcctatcgtcgtgttttgtacgcgcttccctgcgcgcttgacgcgcccctctccgctcggggccggcgaacgatgcgcctcttcgctcggcgctcgcgatggcagcatgatgggggaggtgtcaccgggcatgaaaaaagccgccccgtagggcggctcatgcggacgattgccgctagttggttttctcgttatcgaccgcttttcgcagtgcctcctcgtactcggcctcgctcgtcggttccagcccatgggcttctagcacggggtcgaacagctcctgctccgcttccctgcgcgcctcggctgcggcggctatatcatcgaataagccaagtcttcgcttcttcccctggaacttgatgtaagcctcccacttgcctttctgtctgttccacgacacacccctgacgccgctggtgttctggcatgtcggcgttccacctagatttccgagcttggtgccgtccaccgcgtcggagggcatgcgctcgacctctgaggagaggcacccgcacgagcgggtgttgccgtctttgagcgacaccgagcgcacggtgaccttgcgcccgcaatcgcatccgcacagccacatcgagtagccgttggagtttccggcgtactcttctgctacgagcttgccgaacctttcgcccgtcaggtcctcgtagtccttcttgcggcacccgcacgatgtcgtgttgccgttgcgcaggtcgcgcgtcaggactaccgtatcgtttccgcagtcgcatctgcacagccatttcctcggcttcgactgtgcgaccctcacggcgacgagccgtccgaacctctggccggcaatatcgactggcgctcccatgcggtcacatcgcctcaatgagttcttcgacgatgcgcgattgcgtcttgccggtgcgcgacgcctcgcgctcaagcttcgccttcgcgctcgcgctgatgctgagcatggcgggaaccgtcgcgccgtcgtcgtccggatcgccgaacacggaggcgtacccgtctgcgtccatgttctcctcggcccattcgcgcgcctcttcgtacgactgcgggcttatctcctcgccgccggcccatcccgagccgtcgcgcttggcgcacctcgtgcgcggcccgccctcggagtgcaggaagaactcgcccgtgcgcttgcggtagagggtctcgcagtagtagtccaggtcgccgacgtagcagccgttgtcgctctgcgcgatctgctccgccttgtcggtgtcgtaccgcttgccgttgatgaccttgttcatttcgtctcctaccactcgacgatctcgtctttgtattcctcgacccacgtcccggcgaacacgtcgcgcaggttgtcgaactggatctcttcgaagccgatgccctcgcgctcgcagtagtcgttgatctcgtcggtcacgtcttcggcaacgtcctcgtaaagaacctctccgtcgtattccgcatcggagtcgatcgccttgagcgcggcgaggcggtgcgatccggtgacgaggcccatgttgcacacgaggatgggggcgcccttccagccgttctccttcatggactcggcaagctcggcgaccttcgcgccgtcggttgcgttgaccgtggcgtagcagctgatctcgtcgaacttcatttccgtttcctttcctcgtccctttcgatgcaatcattatagcatacgtagatatcaacgtaaagtgaagtatagtatatatatatgtatttttttggcggcaaaaaagcccgccgaagcgggctcgcctagaacgcgtgctcgaaccctcgccacctcgtgcaggccggagggtcgaacagcttgtgcgccctgatctcgtcgcgcccgagcgagacggtgaacgtaccgctctccatggagtagcggtacgatgcgccgcatccttccagcgcgtcgatctgcgctttcgtcccttcgagcagaacgtcgaatatgtcctcgatcttgttcatgatatgcccttcattctaacatagcggtcgatgatcttctggatgtacgcgtgcctctcgtcgtctccggcgctgttcaggcgccaatagcgctcgcttccgtgcctgttgagccagatgcgcgcctccagctcctcgtgcaggatcgtgtcgacgagctcggcgtccccgggcttggcctgcttgccgatgtagaccgggccggcgtacttccggccgtcgccgtcgtagccgaccttcgtcagccccggagtcctgatcctgccgttgtacgtcggcggcgccgagaacctgacgccggcgagcgcgcccgacgccagcgcgtcgatcctctcctggctcgccgggtgcctgtagcgccccgcggccttcgccttcgccgcggctctcagcgccctgggctgcgcgcccacgccgtacgccttctcgcgcgggtagttgcgcacgaggccgctctcctcgcagtgcttccgcagcgcctgctgctggcggccgaggagcaggcgcttctgcgcgtagcggggcgtctccagcccgatgccggcctgctccatggccgctatctcccgcttcgtcccgcgcacgcgccgctccagctcgcgctggcgctgcatggcctcgtagcactcctccgacgtcatcccgaaatgaccggactcgcgcgggaacgacaggtcgggcagctcggtgacgccggggtagtacggccctatggagtggcggcagttgacccctttgaggccgcccacgccgccgtacccggtgagctggatgagtccggggtactggacccctccgacgagcttggggccggagacgcagcacgggcggccctgccactcggcatgggacgggcgagcgccgtagtgggcggacgttatcacgagatcgtggccgatcgcggccaggcgggcgagcgtcatgcgccccccggcctgggacgcctggctcacgacgtggcggcgcacggccacgtcgatctggctcatgatcccgctcttgtaatcgatcgtctcgacgccgtgcgccgcgatcctgcagacggcgcgcgccaggatccggtccagggggtcgacgcccaggttgcgcgccgctatcgcgtcgccggcgacctcgtaccacagccgctccgcggcgccggccatggcgatgttctgccgcgccacgatctcggcgaggcccagggcggtttggtgggagatctccgcccacgccgcggacgcgccgtccatggcccgagcgactgccgccgctccgtagtacgcctccaggtccgacacgtcgcgcgcgtcggcgcgctccaaggcggccagcgtgcgcgagcgcacctcgccggacaccttcgaggcgtgctcggccaggatctggtcgagcctcgcgcggttggccctggcgagcgcttcgagcgcttccgcctgggagcctccgatgatcccgtccgccaggccgtccaccagcgctcgcgtcaggtcggcgaccaggcgctcctccgcgccgtgcacgatcgcgtcggccagcgctccgacgtcctcgggctcgaccgccatggcttaggcctcgacggggagcgcggaggacgcgtccgcgagcccgcactcctcgcgtgcctcgtcctcgctgtagccctgccagcgcaccatgtagcgccacggggccagcaggcccgccgccacgtcggcgcggtcgcgctcgcgaaggctgtcgtcgtcctggatgatcgagtcgcccatcacgacgttgaccgcgccctcgatatcggggatcgccaggccgcccaggctgcggcacacggatgcggcggccgtgacgatgccctcgatggcggggcgcacgatctgctcgtgcttgtggacggtgcgcatcatctcggcgttgtcggacgcgacctgcttggccgtggccacgccgcccgactcgtccagggcgtagtacttggtgccgaacccgcagcgcttgcccagcacctgcagcgcggtggacagcatcctcacgtcctcgtcggcgcgcaggctcgggttgtactcggtgatcatgggccgcccgtccgcgtacaccgtcgcgtccttgagggcgacgtagaactgcaggcgctcctcctgcggcagcatcatccggccggtcgcctcgtcgcggcgcagcatcgcttcgggaatcatcaccatcttgcgccccagcaccagctcgttgccgatgttgtcgaacgccagctcggtcgtctcgatcgctcccagggccgcgtcgaacagcgccacgccgaacggcgacccctcccagtacgggttgtcgagggcgagcgtgacaagctcgaacgtcttgcgcggctgccgcgtgctgatcgcgccgtccgagtagccgtccggcacgaccgtctcgccgtcgtcgcggaagaaccgggtcatgatctcgtagtctccgcggtcgttcggccggtgaacctcgacctgggtcagcagctcgccgcgcacggcgacctgcgagacgaacgcgcaggccgtgcactcctcgccgtcccagtcgagcggcgcgatgtggcgcgcgtcgtagcgctgcggcgacacgccgaggccgggcgatctgccgaacgcctgcactccgcgcaggtgcagggcccacgcccccgttccggtggcgcacatgcgctgcacgagctggggcgcgccgtcgtcgaagcgggtgcgcgcgagccagcccgcgagccattcggcggcctggccggcttggccgtcctcggccacgctcacgctcgcccgctcgttgtagatcaggccggccatgtcctcgcacaccatgcgcgccggcgtgcagctgcgcaccttgacggtgtgaggcgtgccgttgacgtcgcgcagctcgctgacgtagaagtcggcctcggacctgtagtagcgccaccactcgtccacgaatccgctcatgggggtctcgatgcaggccgccgggtagccgagcccctgcagccacctctcggccgcgcccctccagccgccgccctccgtcgcgatctttgccattgcctgtctccttacggtgtgtcggggtctgctatgaggtcgaacaccgcgtagcgcacggcgtcgatagcgtggttgtccttgtccgggtacccgcggaagcggccctcttcgtcgatctccgcgcggtagcggacgaactcctggtaggcgaggggcgcgcggcggcggtcgatcacgatgcgcgcgcgccccttgagccacacgatgccgtccgcgacggggacgcgcttcgacgcgcccacggcgttgatgccgtaggcgcggtagtccgcgatgctcttgcgctccgcgatgtcgcagcgcacctcgttggccggcaggtcgcggcggaacacgggctcgccgtcctcgtcgcggatcgcgcgcccgtccgatccccgctccgccaggtgctccttgacgacggccgccgtgtcggcgttgagcatgtgatggcgccactcctcgccgtagatgacgagctcgcgccgcttgcggtcgtaggctacgtcgaggagcacccaggggtccgtctcgtagccccagtccaggccgcgccggatccacccgaactccgcgatctcctcgtcggtgacctcgcactcctcgacgttgcggaagacgcggccctggagctctatgcactcgccgtccagctcgttcctcgccgcctcggggctctcgcggtacatgcgctcggcgttggtgacgaagcgcgcgcccaggaactcctcgggcacgtcgcgccaggtggagtggtgcacgaggacggcggggtcgtccgccttgtcggaggcctcgcggttggcccagtgctccgagtccgggggagggttgaacagcttgaactcgaggccgtagtcggcgcgcagcactgagtactcgacgttgcgcacgtcggccgggtcgaactgggagtactcctcccacgtcaggatctcgatcttcttgcgcggatcgtcgaacgtgatggacttgagcttctccggatcgtccaggccgctgaacaggatcttctgcccggtggcgttgtagacgacctccatgggcgacaccgatgccgtgaaatccgcgtcctcgccggagcgcccgatcgtcatgccgcgcttgcggatcgcccacagcacgttggcgtagcagctgcggcgcagggtgttggcgaagcgccgcatgcacagccacatggcgttcgggcgcgccaggaacacgtcgagctgcttctggtacgcgtagctcgacttcgcggatccgcgcccgcctttgaggacgacctcctggatgccggcctcgacggcgcgggagaccgcgcagaacgtcggggcgatggcggcggacagatcgaacgggggagcctggcgggccgcgggatccgcgtcctcccgctccgcctgccggtcggagtcgagcagagccatgttcttggacagcgcctcgtaggccttgacgtcgccctcggcggcgcgcatcaccatggtggcggtgacggcggcggcgttggtgcgctcgtcgggatccagccccatcagctccatcgccttgttgtgcttcggcgacgccgagtccatcgacaggatcagccgcgcggcctccttgaggctcgccagctcgcgcctgcgtgcgcccgagcgcagcccgccggcgcgccccttctcccgcgcttcgctcgtgcttcggatcttgtggggctctatgttctcgggattcgccatgccgggcatcttgccaggcgcgtcacacggatgcgccccgccgggagggggacggcggggcgcgaagaggagggtgccgacacgtcgtcggcacgttgcatgatgggggagatgtcaccccagcgattcgacgatcgccctctccctgtcggacagctcccacctatgcgcggcggcgcgctcggctgcggcgcgctcggctgcggcgcgctcggctgcggcgcgctcggctgcggcgcgctcggctgcggcgcgctctgcgcgctcatggtgccccgccgcctcgtccgacagcagcagccctcctccgtagatcctcttcccggcttcgcgctgggcgtccagggcgctcacgcgcgcgcagtctcccggcttgacctccaggcgcacgccgtacttggcgtacctcccgagcatggacgccgtcagcacgtggctcggatacgagtacttcgggagccgctgcctctccttcgaccgcctctcgtcctggacgcgcttcacggcgcggaataggtccggcgctgtctccgccacgttgtcgccgaacgacgtgacgaacgaggtgcgcacgactgcgccgttgtggtactcgatgtcgcaatcggcgaacacgtggttcgtgcgcatgcacgtcttcgcgccgctgagcgccgtcaaggccggggcgaacaggaagaagccgatcccgcggtccaggtagaactcgcatatcttggacaggatcgagaacggcgggttgtcgagcaccgtgcagccctccggatagtcgaacgactcgtagtcgcctcctggccagaacgggcgcacgatgccgctcggatcgataccgaaccgctcgcacgcccaatcactcacgcagtcgtagacgtcgggcggggtgtagcagtcgtcggtggtcttcttcggcttgaacttctccacgaacccgtcgtagtcctcgaacagatgcttctgccggcttgtcgacgccatggccctcctatcgcctcgcttcgtacggcggcgattgtccgccacaggtcacccggtccatcgggacagctctcgcacgtccatgtcgagccgcatcgccagcaggtactcggtctgcgcgccgcggctccccctccatccgggcagcaggcacacgccgtcgcattcggctagcagcgcgacgcagcgcctcatggcgacgtgccattccgcctgggcggggacgtgccggtgcggcacgaccgggacgtggccggcttgcacgagctgcttcgccgcatgctcgaacatcgccaggttgcgcctcggcctgcctgtcacgggacccgccacgtacaccctcatagctcctccatcctcacgtagatgccggccgggtcgctccacagcttggcagtcgaatgcagcgcgatgcggctgtcgttgtcgaagtagccgagcttggccatcacgtcgaacacggtcttctccacgttgtccgcgtcgggcttgacggcgtgccacgatccctgggcgcgctttccgcccgtcggccagcagatgcgcatctccaccgccacggggccgtcaaacggcttctgcggggcatgtttggccaaatgcgcctcccacttcgcctcggccgcttccagcgccccagatttgccgagaaccgcctttccggcgatcctgtggatctccatgtcgttgtgcgtcgcggtcggcggcaccatcggctcgaagaactcgatcatcgctccaccttcctcgcctgcgaccagaacccgcacgtcgcctgcgcgccctggatctcgttgtcgcgcatcagggcctcgtacttggcctctccgtagcgcttcttgcggcgctcccggtcgcgcagcacgttggccacgagcacgtccgcctcgtcgatcgggtagtagtgccgcgggtacctgccgtcgtggtcgtgccagcgctttttgatccacgggccgatgttgtagcggtaggcgaggtgcttcttgccgcgatggtcgctgatcctgatcgagttgcacatgccgcagtcgagcttgaggtagacgctggacgtgctgtaggcgtcgtagcggtgcacggtgaagccctcggccaggaaccgctcggacaggctgtccgcgagcgccttgaagtcgcagccgctcatgccccgtccacctcctcgaccacggcggcgcagtaaccgtacgacgcatcgcctccggacagccgcacggcgcacctctcgcacgcgcagcttccgaagtactcgatcctgctgcaaacgagctgcagcgccttggcccggtacctgtcccgctcgtcctgcgcgcggagcatcgcgcgccggtggcgtaccgacgacatcctggcccgctcgtacagcctctgcttggattcggcggcgcgcctccactcgtcccgctcggcctccgccttgcgcagcatgtcgcagctgcaccaagcggctggcaccctgtcggcgcagtgcgtcacgtcggcgtgcccgcacgcctgctcgtggccgcatcccgggcaaacgctcttcatcatcggtcgtcgtccttcctcttcgcttcccattcgtctctcaaaagcccgtacaccccgacgagcacccatgcgcagaacgctgcgagcggggccgtcgatgcgagcagcaaccacgccgatgtcatgacgcatcgcccccgtccagctcgcgcagcacttcctcggccagctcccgcgcgtcctcgcccgcgtcctcgtagtcgagcacgacccggcaaagcgcgaccacgccgtccgtccgctccttgaggcacgcgagcagcgacgagagatcccatccgtcgtagagcgcgctcatgacgcatcgcctcccttcccagggcgcttgtagcggtagtcgcggccgcatccggcgcagcgcagcgcctcgtacccttcggcgtccgccgacgcgaggcgccagtacccgtcgtagaggcatgtcgggcagtacggcacgtcgctcacctgcttcgggacgtccccgtcctcgacggcctcccggatgcgcccggcggtctcggcctgccacgacccgtagtccgcgtcctcctcgagcttcgccgcgatcctcagcagcgccgcgacgtccactccctgcctgaggtagccgcgctcggcggcgatccggtcgaacagctcggcgtcgatcttgcccgccatgtcgcggatggcctcctcgtcgaaccgcatggtggcgaggacgccgccctcgtccgccactatgtccgtcctcacgatcctgtcgaaatgcataattgctaccttcttcctgtcaatttgttcgaatctcgccgcttgtcaagggcaggggaagggaggacggcgggcgcagctttagcccgccttccttcaccccttgaccccagggaaagggaatctatacccccccgtaggggggtactttttccttccctcggaaaaaagccggattgcccgcttttttccctcgcagggaaaagaaggaaaatccccgcttcgcgtcttttttgacggaaggaaaaaagcgtcgcttcgcgtctgaaaagccgtcgggaagggaaagaaaaaacccgcttttttccttccgtcatgcctgcgccttccgaccgacggaggccccgtcgatccagaacccgccgtgctccttgatgcggttgcgcaccgtcttctcggtcacgcccatgaactcggacacgtccttgacggtcacgccgccgcccatgtcgcacgccgagaacgcctcctcgagcgccgccctgcgctccttcttgcgttcctcggggctcttggttcgccggtccctgccggccttcccggcccacctgttgccctcgccctccggctccacgtccgacagcgcgcccgtcgagtcggggcggtgcaccgggtagtcgaaccacaggttcagcggatcgaagcgcgggaactcgcgcagcgtgccctcgatgcgccacgccgtgcgggccttggccgcctcgcgggccgcgtgaacggcctccagcatggcggcctcgccctgccggtcgagcagcgcccgcgcgccctctaggaagcgcttggccgtgagccggtcgtcgtcgccgatcacgtcccgccatccgtccggcccgacgtcggccatgacgcgctccagcgccgcgcacgcggccgcgtcctcctgctgctggcgcagcgcgtcggtctgctcgagctcgatcatgtcgagcagcgcgtcggggtcgcgggcgaacacgccggacccgctcacgcggtccatggagcgcttggagccctggctgcccttggagtggtggtggcagtacacgacggcgcagcccagctccgtggccacgcggtcgaactggttgcagaacgcggccatctggtcggccgagttctcgtcgccggtgatcaccttgtagatgggatcgatcaccaccgcgatgggccgcgtcttgagcgcgcgccggatgagcgacggcgccagctggtccatgggcttgctcttcccgcgcaggttccacacgtcgatgctggccaggttcgacggctcgacgcccatggccccgtacacgtcgcggaagcggtgcaggcagctcgccctgtccagctccaggttgacgtagagcacccgccccttggcgcagccgaagccgagccacggcacgccctcggcgatgctcacgcacagctcgatgagcgcgaacgactttccggccttgctggggccgcccagcatcatcttgtggccctggcgcagcaccccctcgatcaggggaggggacagctccggcagcgcgtcccagcagtcggccaggctctcggggtcgggcaggtcgtcgttctgctcgtcgatccactcgcgccattcggcccacgacgccttgcccgcgtccacggcaacgagccactgcttgcggccggcgcgcgtcacgcccggcatcctggacaggcggctcgggttcttgttctggacgtcgaccttcagcccgttctctcggcacgtcgagtagagcaggtcgacgcgcttgcggtactcgtcgtagtccttggcgtccacgtgcacgacggcgtgcacgctcttgccgccgctgtgcacgatggccgccgctggcagctccagctcccgcatgatggcgagctggcggccaaccgacatgtcgtcgctctcgacgagcgcgtagcggtactccgccacgttgtcgttgcgcacgccgttgccgtcgagcgggttgaaccggatccacgcgccgccgtcctcgtcgttccagccgatggacgaggccaggtcgtcgtcgtacttccgcacgcgctcgatgatctcgcccgccgtctcggtgtgcggccccttgcccgacggcacgcgcctgccctcgttgtcccacgactcgaccacgtagcccacgacctcgccggggtcgaacagggcctccaggtaggctatcaggtcgtccgacccccgccattcctcgcccggctccgcgagctcggcgctctccacccacgtcgggtcgacgatgcgccccggcgcggacgccccgccctggacctcggtcacgtcccagccgaaggcctctcccttgtcccaggcgggcgaccatcccgcgtcgcgcgccatctgcacgagcgtgccgcccttgacctcgtccgccccgcggccgaagcccctccacttccgcgcgcactcgccgtccttgtagcgggccgcgtcgcgccggctccagtcgtcccagagcgccagcggcatcccctcggcgtgcagggccatgcccgcgtgcagccactcctcgtagctgcacgcggcggggtcgaccgccgcaaggcactcctccagatcgtatccttcggtcatccgtcctcctctttaggctccgagccggagcgtcgggacgcgcgccgcgcgcgcttcccggctcggctcgtacgtcgccgggtcgatgctcgccggagtgcgccatccgttggcggcgatgcggctgatgagcgccgacgcctggtccatcgtccactcgccgacgcggcggaacccgcgtccctccagctgcctgatctgcttcggggtcgccaggccctccgcccggcgcttggctatcttgtccatcaaaagcgacgccttgcctgcgcacccgatctcgtcggggcagatgccggccttctccagcgcctccttctgcgcgtcgctcgccggtgccatctcccaggcgaactgcgggacgtagccggtgaggtcctcggacgctatcgacatctcgaactgcagcgggtcgacgagtttgcgcttgcgcttccgcatggactccagctgctcggcgagcgcccgctcgcgctcctccacgacgtccttggccgcctcgcgctcgacctcctccaggtcctcggggcagccggcctgctccaggcgctcggtcatggcgcgggccacgtcctcgctttcggcgatcaggtgcgccggccggcacagctcgtggcgctcgacgtgccagaggaagtcgagcagcagcagctccgtcttgcccgtctcggggctcaggcgcgtgccgcgcccgaccatctggcagtacagcgagcgcaccttggtcggccgcagcaccaccacgcagtcaacgctcgggcagtcccagccctcggtgagcagcatcgagttgcagagcacggcgccgccgccggcctcgtcgaacgccgcgagcgtctcggcccggtcggcgctctcgccgttgacctccattgcgcggaagcccttggcctccaggatcccgcggaacttctgcgacgtcttgacgagcgggaggaagaccaccgtcttgcgctccgcacacccagccgccagcatctcgtcggcgatgcgctccaggtacgggtcgagcgccgtgccgaggtcgccggccgagtagtcgcccgactgcgtgcgcactgcggccaggtcgatggccagcggcaccgtctgcgccttgatggggcagaggtagccctccttgatggcgcgcggaagcgtgtactcgtaggcgatcgagtcgaagtaggcgcccaggtcccggcggtctccccggtcgggcgtggcggtcacgccgagcacgtccgccccgtcgaaccagtccagcaccgcctggtagctggccgacagcgcgtggtgcgcctcgtcgacgatgatcgcgtcgaaccagtcatgcgggaaccgctcgaggcgcgacggccgcatcatcgtctgcacgctgccgacggtcacgcggaaccactcgccgacgctcgtgcgctcggccttctccacgctgcagccgaggcccgtcgccttgccgatcttgtcggccgcctggtcgagcagctcgccccggtgggcgaggacgagcacgcgcccgcccccgtccaccacgtccttggccaccatcgcgaacacgatggtcttgccgcacccggtggggaggacgaggagcgtcttggcgcgcccctcgtcccactcgcgctctaccgccctgcgcgcctcctcctggtacggcctcagatcgaccgcgcccatcacatctcgtaggacgagtgcgggcgcggagccgcttgctgcggggcgaccggcaggctcgtctgctcgggcgcggcggcctgctgctccgtcggccattcgcacggcttgaggtacgcgtctatgtcgttcgcctgccgggtctcgccgttggactggtagtcgcgcaccttgatcttgacgtatccctgcttgccgacggccgcgttccagtcgatcttcacgctgccggtctgggggtcgcggtcgaagcccagcccttcgaagaagcgggcgatccgccatgccatcttggtgttgagcatgagccggtcgacgacgggcgcccagccctggctcgtccacacgttgagggtcaccttcgcgcgcgggcacgcctccatcttgtcggagccctcgaagcgctctcgctcgatcttggccacctcgaaggcgtacgtacctgcgggcaacagggtgaaccctccgtcgtccacgacctcggtcacgtcccagtcgagcgcctggcccttgtcgttctctgccatgtttcagtcctctcttagatcttggtcatgtccggagcgccgaacggcacgggctccgcttcctcgcgcatcgcctcgatgttggccacgcacttgtcccactgcgcgacgatgccgccgagcacgtagtcctccgggtagttctcggccggggtatcggccgagaagaaccccttcgccgcgctcatggcgcgtatctcctcgacgctcacgccgtcgcgctccatcagctgcagcgcgggagcccagaagtcgggcaggccggccgccttggatttcgccgtgtcgctcacgacgctgccgtcgtccgcgaacacgatgctctgcaccggcttcggcgcagccggcgccgccggggcagggaccgcggctgcgggggccggcggcgcggcgggggcggtcttcgcgggcggcgctgccggggccgccgggcgtgcggggacggccgcgctcgccgcccgggccccgggcgcggccggggcggccgggacgaacgcggcgatctgcgcgtagtcgagcggcacctggggcggcaggccccagcggttcttcgcgtcccagcaggcgtggtgctgggcgtgcagcacgcgcttctgcccgccgcgcgccttgcccttcgcgcccttgccctcgccgacgacctcgacgatcgtctcgtagttggcgaacagcacggcgtcggcccactccttggccttcgcggcgtcggacatcttggccgcgtcgatgagcgcgagagcccaccggttgtagctcgcggcctcgtccggctggtcgaacttgcggaccgcggcatgcgccgtgagcaccacgttgatcccgccctcggccacgtcggagagcaggttgaggagcttgccgaactcctcgacgacgaacgtgtagcccttgccgtatccgggatcctcgatgctcttccacgatttctccgagcagacgtggcggatcgccagctgctcagcccagtcggccgtgtcgatcacgagggtcgcgcagggcctggtcgccttgacctcgcgcacctggtccagcaacatggtccagctccgcggcgcctccgtgcgggcgacgtcgtagtgctccgtgctgccctcggtgtcgatgaagagcgggtcggggaacttcgccgcgaaggacgtcttgcccacgccctccggcccgtacacgatcaccttctgcgccttctgcacggcgccgcgcgtgatgttgagcgccatctacatcacccacttgtcggctgggaggaggatcgggacgcgcgccggctcgttcgcgtccgtccggacggtcggggcgtcggcgaactcgggagcgcgctcggccgcctgtccgagttccgcgccgccgtagccgtcctcgatgacgattgagcactcgccgccggtggacacgcgggtggcgatcacctgcaggccctcgccctcggcccactcgccgaactcgcgcatggtatcggcgtccatctgctccagcttgtccaccagcacgaacccgcactccggcttgagcttgcgcacgatcgcggtggcgacgcgcagctgctcggacccgctcatgcagtcccatcggcgcccttcgtaggcgagcagcccgttctccacgacgaggccaggcagcggcaggtcggccccgtcgagcagcgccatcttggacgcgcgcacggcctcgatccgctcggtcatgtcgtcgtactgctcggccagctcctcggcctcgcgctcggcgtccgcgcggcgctggttgtcgcgcaccttggcgttgaccgcctcgatccgctccagctgcgcctcgatctcggcggtcgactcgtcctgcagctgctcggcggtcttgctcgcgacgccgaagtcctcgaccgacttgaggtactcgacgttgagcgcggcgcgctccgacttgagctcgtcgatacggcgcgtcaggtcggcgagcttgtcgcgcatctgatcgcacctggcctcgatgttgcgcgcctcctggcgcttgcgctggttctcgccgttgcgggcgaggatctcctgctgcgcctggatcagctccatggcgctcacgggttcggcgggcgcgtcggggtgcatgggcatgtcggcggccgcgcccttcttctggtcgcgcatctggccgacgccggtgcgccggttgtagagcgcctgctcctcggcctccaggcgcgcgagctcctcgcccacgccgatgatgccgagcagcgtcttggccttgtccttatcgctcatcgccaggaacttgggaaggtcgagggcgagcgactcgacgaacgagtccagcagctgctggccgcccttgcgcccctcggggtcggtcaccttgagggagccggccttgcccctgcgctccaccacgatgccgttcgacagctgcaccttgaggtgagggtcggtcgcgctgcccgcgcgcttggcctcgctcgggcgcttgcggtcgccgccgagcgcccaggcgatggcgtcgagcacgctggtcttgccctggccgttgcgcccgccgatgacggtgagcccgctctcggccggctccagcgccaccgccttgacgcgcttgacgttctcgacctccaggctgttgatcttcacggtcatgctactcctcctcgtcttcgtcgtgcgccagcgcggactcgcacaggctcttcagatctatgtctgccgcggtcggctcgtatccgtcggctgccaaggcggcgagccagccgaggaagcgctcgacgttcgacgcgtagcatgggcacctgccgtccacgagggcatcggagatccacggatacagctcagcattgccggcggccatcatgtagccgtaggctgccagccgggggcagaacatgccgtcgacctcggtgccggtcgcactctcgaacttgctcaccttctcgccgatgccgccgtatccggacagcgccgcgtcctcgaccacctccatgacgcagggcatggacccgaggtcttcgatgcgcgcgtggaaccaggccaggtgcgcggccttcgcggcttcgatcgactccttgacctcgtcgacgcggcgcttccgctccacttgctccggatcgaccctctcctcgtcggcggagacgggcttgcagatctcgatcgcaggtcccgttccggattcgaggatgtacgcggcgcagccgtcgatcccggcgaccgcctgcgcgagggcgtcgggatccttcacgtcctcgcaccacgaccacccatcctggctgtacaggcgcttctccgagatcgcgactcccgcgtcctcgcatgcgcggacgagcgcggcgcggcgctcgtcgcgctgcatccgctgccgctcggctttcgcgacgtcgcgccattcctcctcgcggcagctcgtcagcttctcgacggcggcgccatcgccgagctcctcgaactcggcgatggccagcatgcggtcgagggtcatgtcgtcgccggcgtcgtccacggcggcgcgggcgcggcgcagcttggcggcggcgcccttcggcatgcgcccggcgcgctccacgcgctcgggatccacgccgagcagcagcatctgctgcacgccccggcttcgctccacgtcggtcagagggcgcttgtcgtccgtggccaccatggcgaccatcgcgttcgcctcgtccatgtcgtcgcatacgacggcatggcagcgggcgagcttgttcttgcacatggccttgtagcggcgctcgccgtcgacgatgcggtagatcccgccgtcctcgacgaccacgatggggttcaccggctcgccggggttgagcgcgttgagcatgcagctctccgcgagcgcggcgatgtcgccgaagtccttgcgcggattcttctcgtcggggtacacgtcgtctatgccgatctcgcgtaattccatatatcctcctctgactaggtaaaacgttgaaaagtaacactcatttcgattttctgggattggtgcccaagacctctctcatccgtttgagcctggtcttcgccgcgttgtagggcagcagcagcctgcggtgctcccactcctccagggcgagcaggtaggccgtctcggccttgtcccgctcgtagcggctcacggggcagctctcacgcctcttcggcctgggaccgagggacgaggggcgcgtgccgcgcttggcctcctggtcgtcgtaggcggccctttgccgaggggtcatcgatgcgtacacctcgacgcacgccgcctcgcggcctgcgagctgctcgcgcatccggcagacgcggcatcggccgtccttgtcgacggcggagcgccatccggcacactcgtcgcaccatacgagccgggtgcggcagcacctcagagacaggcccaggcgcttggcggccatcttgacggctccgctcgagcgcttgagctcgcggcagatgtcgcggcgcgggagtctgccggccatgtcgcgcagccggtcgatctcgtcggtcgtccacggcctctgggccgagcccttgcgcgtcatcgcgcgaccgcgcccttcgcgtgccgccagctgcgcgcctcggggcggcgccccgtgatgtcggcgaacatgatctgcagccatgcggtgcccgcctggctgtcgagcgcctcgacgtactgcgggtggatgcgccatgccagggacggctcgtccatgacgagcatgcggctcaggcacgcccaatgcgccatggccatgggcacggagatcatcgtgaccacgggggttccggcgtcggtcgtgcgggcgatgcgctgcacgtcgagcttgagcgcgtcgtagttggtgacggcggggttgaccatggacggcctcttggcccaggcgacggcctcctcggcggcctgcacggcgggattgcgctccacgcctaccaccacccctggacgaggccctgggcggcgacgacgatgatcgcgtacacggcggtgatcgcggcgcccaggaacaggagctccgcgcgcgtcttatcgtccagcctcatgcgatccccgccttgcgcagcagccatccgggcagctcgctgacgatcacgcggtacacgctcttgccagtcttgaaacccggaaggcgctcgctcgggttggcgatcttgctctggccgtgcaggtaatcgtacgacaatccggtaagatcggcggcttcctgcagcgagcaggtcagacgaggggacgcggtttctggcggcgcattcttgatatcgttgccaggtttggcttcgatggcttgcatgtggtatccttcctcttcgatggcgggcgttcctgccagggattgccgcccgcgattgtctgcggccatggctttacgccgtggcctttttcgtcaccacgtagcccggcaggcgcatgtccacggcggtgacggagctcccgtccgcgcacgcggcgtgcagggtggccttgcaggatccggtcgccttgcgcaggacgatctcgcgaacctcgcggccggcgccgccctccagcgtgccgatctcgtcgcccaccgcgacgggcgtcccgtacgcgtcgacgatcccgatgcgctcgcacgcctcgacggcgtcgactatcacggacgacctctcgggcttgctggacagccgcgcctcgatgcgcgcaacggcctctttgagatcctcgaactcggcgagggtcgggtatttcctcggtgtcgtcatgattcacctcctttcgctgatcggcgaacttcgcgtttcgaataacccggaggacggcagcgtggtacgatgcggcttggcttgcgagagggggtgattttgatggagagctttcaatcgtttctcgatcatatcgacatcgatcagctgagcgattcggttatgaacgacagcgaggctgctgttcgcctttctcaaattgctctgggaggcgagcggcctgaatcatcttcgctgcaagatgcacggatggcttcagcttttgcgaccccgacggttctggggatactggggctgtaccatgagtggctttgcgttcagctggagcaacgggggtagggattgtacgcgggtgctcgatgccacgcttgcccgcgcgaatcctctctattgatcccatggcggctcctttcggctgccgccttccgggctattcgattctcaaagttcattacgttaaaagtaatttctagtgcaaaaaaatatcgttgacagcttccaaaagaatcggtttagcaacatcggacatttctcgatagagcaaatccaattccccaaggcgccaggtagaaggatttcgctctctttctagataggttggctttgcaatatggcagatagtagcagctttttccgatgatagtcccgatgcctttcgcgctgcctcgaactttccaatgacgggcatgaccacctcctttcaacgaaagcagcttatcattacaatacgttaaacgcaatataaaattatttaaatgtatctaacgcatggtaaaatgcatttaacgaaaggtggtatgaaatgggtgttgctgagaacatagacgccttgcttgtaaagttcgacattacagctgaaggcctcgcgagaattgcaggtgtccagcctcctactgtatctcgatggcgtcatggagcgatgccgcgcgaggagccaatcaatagaatggttgagtattttggtttagaacgtgacgatattgtttcggatgcttttggactcgccgcaaaggaacatgggcgtgtcggcataccaacttttaagcctgcttactcgtaccacgttgtcccgatgctgggtaatgctgcagcaggagagtggcgagaggtgtacgagcagcacggcgaggcggttaccatccccgacgagttcgcggagagccaccctagcgctttcggagtcaagccggcggggtcgagcatggatcttgtatttcgcgacgacgagatcgcgatttgcgatcccgatatggaggtgcgcgacgggagcgtggcgttggtcggcgtcaacggggacgaggcgacgataaagcgcgtattcttcgccggcaacactatcgtcttgcatgctgagagcaccatggccgacgagtacccggacatagccatcaacacaaaggatccggcttcgccgcccgtgcacctcatcggcgagattttttggaagacgcttccggcgaggccgattaagttctaggcgaaaggagagggttgtgaagaaatcaattgcatccatagcggggtttttgctcgccgcttcactgttgggatgtgctcagagcgacatcgatgtcccggatgttgtcgggcaaaaggccgacgatgcaaaggatgtcctgatggattccgggttttataacgtggacatggttgaggaggacggcgatgccgcgtatgtggccgctgcttacaccgttgtcggccaaagcccccaagctggggacaagtgcactgcgtccgataccgtcacattgacggtgcgaaacgatgcggaagccaaggctgcggagaaaaagcaggctgacgccgctgccgaggcgatgctcgacgaaatggaggggagccccgctgccgaagcgtacgatgcgctaacttcggatggctattccgtcgaggtgcttcatgccgtttcgaagcaggattattccagcgagattaatactggtgaaaccgaatggctcgtctctgggtacgacgggctcaacgccgataagaagagagtgacgatccttgttgacacgcgggatggcatcgaccagagggctgccaacgccgccgtccgggaagtccttgacgggaagttgccggtctccaatgcatggacggccgtcaagagctacggcaagcagcagtatccatacgggttcaagctgcacgacatcatgggcgttctggccgaaacggcccaggacgagaacacgtggtttttgaaggccacgtgcgacgtgacgaacgaatacggagccaaggcgaaagatcttgtgtgtgaggctgaggttgccggcactaaagatagccccgaagtgatttcgttcacggtgtactaggcttgttccgaatcacgaagatgggaaatgaaatgtgcgaatactgcgaagacggcagaaggctgatcgataaagacaaggcaggatcaggcgctgaggtgtggatcgaggcagggcgcttggtggtgcgcagcgaatgcgaatgcggatcgagctccacggtcatgtcgaaccagatcaaggtttgcccgatatgcaagcgggatctgtccgacgatcatctttggcgcgagttcgacccgtacgcctggcctggattgaagtaaggccggtaaatagcgcagccccgactatcttggcggacggcggggctgcagcctaacctgacggaaaggcatggtgaagtataccatgaagcgcaagaggtaccagctggagccgctcgacgatggcccaagggagaaatgccggcattgggggatccgcgtgtcgtgcggccacgatccggcgacggggaagcgcctgagaccttacgagacgttcgagggcacggaatacgaggccgatcttcgagccatggccataaaggtcgagcacggaatcgtcgagaccacgtccatgaccgtggccgagtacttcgtcggcatgtacctgccgtgggcgaagagccgcgtcagaactaaatcgtacgaaggcgggccgcgcgacaagagtctgataactcgcgagacctatcgggggtacgagcagaccgccaggctccacatcatccctctattcggccatatcggcttgtccgacctcaagccatactacgtcgagcagaagctggccgagatcccaagcctcggctcccgccgcaacgcctacaagctgttgaggcaggggtaccgcagggcggtcaaatggcagctcctgcagttcgtcgtcacggacgcggtagaggagccgacggccgatcctgtcgacaagcccaccgtcaagtcggcagaaatgtgggattacatagacgcgttcgacgagcccggagacgaggacgtgcgcatggccgttgccatcgggttcggcatcgggctcagaaggtcggagatcgctgccatcgacaaggaggagatcgactggaccgtcgacaccgaggacttcctcggcgcagtgaggatatggcgctcgtaccattttcgtaagggagaggggtggtttgagccgccgaaatcgttcacctcggcgagaacggcttatttcccgcgatggctcggcgagctgttgcagcctcacgccgaagggtcggggcctctgctcgagcacaagggcgagcgcacgaagccggatcgcatcaccgaccggtggaaggacgtggtagcgaagaaggggctcccggtggtcatgcctttcaagaacacgcggcattcttgcggcacgatcctcgtgcgcgaggacggtctgccgatcaccgacgtgcagcagctcctcggccacagcacgccggtgatcacgtcgacgttctacgtccagcgcggcaccgagtcgacggagcgcgccgccgccgcgatgaacaagagggcgaaacccgttgtcccagattgtccgaaaccccccgaaaacgccggatcgcagccggatgataattatggcgataaaacgaaaaagagcgtttcacctggtagtttcaagatcatcagacctgatttcaaacgtgcttcgaacgggtagggcaaacttaaaatcttccggcttcggccttgcgggttcgagtcccgccgcccctaccaccttgcgcttcatggtgcggcgagcgccacggaggcgacgcctcccgcttcctactcctcgtcgtacgcttccagcacggcgggcagcgacgcggtcacgacgttgccgacggccggcagcccgatgagcaccgcgctgatcacctcgtcgcgcgtggcaccgtgcatcttcgccatcttcacgtggaacggcaggccgctgtcgagacgggccgccgccatgacggcgaggtaggcgagagcggcggtcttgtcgtcgagcgcgctggccgcgccgagcgcctgcaccgcctccgaccatgcctgctggtgctgcggagcctcttgggcgaatgcctggaatgcggggctgacgttcatggacgcctccttctcgcgcgggattttcgatgctcccagtgtagcaagcgaagcgtcgcttgacgcaaagcgttgcatactctcaacctgatatgcggagaaacccggaaaaataagccgctggcgcagcgcacggaaagcgcccgcttttctttgtgataccatgtcgagcggatcattcgcccaggcctacagagaaagtgctatggagacaatcaacgaaatcatcgcagccgtagaagaacctcccgagtcgttcgagcagtacctgacgtcgtacgccgaccgcgtgggcgacctggtgaactccttcatcccgaagggcacgcacgcggacatggaccgctacctgtaccagccgctcatggcgtacagccagaacggcggcaagcgccatcgcccgctcatctgcttcgcggcctgtcgcgccgtgggcggtgacatggcgcgcgcgaccagcgccgcggccgccatcgagcactttcataccgcggccctcatccacgacgacatcgccgacgaggccgagcttcgccgcggcgagccgtgcatgcacctcaccgagggcatggggctggccatcaacgcgggcgacctcgcgctgtccctcgtcaacggcacggtggtgtcggatgagaacctcgacgatgccacgaaggtgcgcgtcatcaccgagctcatcgacatgacccgccgcaccatcgaaggccaggcgctcgacatcggatgggcgcgtgacggccgctacgacatcacgcctgaagactacctggtcatggccacgcacaagaccgcgcattactccggcgcggtgcccctggccatcggcgccatcatcggcggcggcaccgaggtcgaagtcgaggcgctgcgcaactacggcctggacaccggcctcgcgttccagatccaggacgacctgctgaacctcgtgggctccgaggagagcacgaagaaggacttccgcaacgacatcaccgagggcaagcgcacgctcatggtggtgcacgcgctgcagcactccgacgatcgcgaccgcctcatcgacatcctgtcgtcgaaggagaaggaccaggccgtgctcgccgaggccgtcgccatcatggaggcgtccggcagcatcgactacgcgcgcaactacgccgagaacctcacgagcatcgcgaagaaccgcctgaccgacatggtgcgcccctccacggcccgcgacctcctcgtctccatggccgactggttcgtcagccgcttgaagtgatctgatctacgtttcgagatgcacctcatcagggcccggattcgtccgggtcttttttagcgcgccaactcctcctgcacgaggtcgatcagctcttcgcggctgtgaacgtccagcttctgatggatgtggttgatatgcgttgacgatgttcccggcgagatgcacagggccttctgcacgtacgtcatgttgcggccctgcgccaccagctcgagcacttcggcttcccgtgccgtcagaccgtagcgctcggcaagcgcgtgcgccgcggcggcaggggtactctcgcgctcgcgctccgcgggggctttcagcccgatgcggccgagcatcaccgcgacggtcaggcacaggatggcgtaagcggcgaacatgatcaaaaggatgtcgaagtcgatggcgatcttcatgatgtcgaacaggagaatggccgcagcgtagccgacgatcatgccgatgaggccgaacgaacgtgtccagaacacgaaggtgaacgatccgatgtgaaagtacttcttggcattgctcgggccgacgctgcagatgatggcctcgcagatgacgatgaacgccacgacggccggcagcgtttcctgcaaaccgtagcgaaggaacggcgggagcagcagaccgagcgaggcgagcgggatgagcacggtggtgacgagggaggcgtgccgttgcggcaacagcatccaaacgcatcctgcgatgacgaggacgagcacggtccatcccgcgaggaaggggtcgatgccggcgggtatcatgaagttctcgacggttccggtgcgccggttcaaaagcgagaagaagctgatcatgaatccgaatacgaacaggatgacgatgaggtacaggggaaacggaggctggatcgtcacgctgggcgcagttcgtgccgacgcgcgcgttcgataagcgcctagtgccgccgagacgacgggcaacaccccgccgaacagaatggccgatcgtgcgcccaactgtatggatacgaggacgatgacgatggtgagcaggctgcagagcgctaggaacagcggtcgctcctgggaggtctcggacgagatatgctcgcaccatgcgaggacgaggatggccgatgcgccgcacgcgaacaagcgcgaccaggcgacgggaaccatctcgggtgagagaaggctgactgtctgcaaaatacacgcggttccggagcccgcgagcccgaggacgaacaggtgcgacccgtgcgcgcgaggccccaacaacccgaccgcgaccaaggcgacgacgttgccgcatatcagagcaacgttctccggtgccagcccgatggactccgcaatcttgatttccgacgacccgaacatgatggcgacgtatccccagaaaagcgccgaggcgaacgcatcgagcgcgatgccgcctctttgaatgtcggagcgggccggtttggcgacaactcgactcttttctccccctgtggcttgctgcattgcattctccccggtgagctgcgtgtcaaatactttatatgatggacagatccccttgctgcggcgcgtaaatcatataccttgttcgatgttttcgcgcttcgttcccctgtacgctcctcgccgtcaaaggccctttgcgagatgcgcgtcgaagcgatttcgcggcctatggtagcggaaaacaagaggaggaacaaatgggaacaagggataacgagagcatgggtttaacgcggcgtggctttctcaccggcgcgctcgccctcggcgcggtcggcgcgggcagcatgcttgcgggatgctcgtccgaggggggcgcgggcgctccggcaagcgacgagcgtgcgtgggatcaagaaaccgacgtggtggtggtcggaacgggcttcgccggtttggcagccgctcatgaggctgcgaaggcgggcagccaggtcgttcttgtcgaaaaagctcccgaaaagtacgcaggcggcaatagccgcgcatgcgcccaggccatctggtcgccggaaaagaccgccgaaggcgttgcctacttcaaggagatcaccggcgattaccacctcgtcggactcgacgatgccgtgatcgaggcctatatcggcggcgcgaaagagaacgccgattggctgttggacgagttcgagatcgagacgaagacgcacaacgcctgcgagtaccccgctgcgaaaaccgcttcggcggtgggcgattccaacacgctcattccggccgaagggttgggtaacgctcgggtctgggcgcctatgttcgaggtggtaggaagcgagtcgggcgttacgtctctgttcgagacggccttcaccgatctcgtgttcaacgaggctggcgaagcgatcggcatcgaggcgcagcaaggcgaatcgcccctcctcatcaaggcgaagaagggcgtcgtgctcgcttgcggcgggttcgagtacaacgaggaaatgaaggcgaataactgccgttacccgtcgctcgcgtggggcatgccgtacaacacgggcgatgctctgacggcgtgtcgcaagtacgatatcgacttctggcacatgaactccgcgacgccggcaacgcgcgtcggcgtgcaggctacttggctcgatgacgatttcagcgaatgcggcttcgactgcgaagtggcaggcgatgccgggtacgtgtggaccgacaagtacggcaagcgcttcatggacgagactcgctcctatcagcacggatacggtcgcgatgcgctgttctacaacgactccgccaagatggaatggccgcgcctgccgttctggcaggttgtcgacgagagcacgctgccgtttatgggaacgagcggcagcggttgggtgcacatcgtcggcggcaccagcgctcccgacagcaccgaagagttgctttcctcgggcttgatggtcaaagccgacactgtcgaggaacttgcttctcagatgggcgtcgaagcgacgatcctgcaggagagtgtggacgcgctttccggtcccgatgacgagttcggtcgagctgcggaaaagaagcgcgcgctttccggcacgctgtatgcggtgcagctccagcccatcatggtgaacaccaacggcgggccgaagcgcgatgcgagtgcgcgcatcgtgcatacggacggcacgcctgtcgagcggctgttctccgctggcgagctcggctccgtatgggcttggtactaccagggtgccggcaacgtgagcgaatgcatggtgttcggccgcatcgccgggcgcaatgccgctgcgctgactccttgggacgctgaagcttagggcttcatctgttccgtgacgcggccgtccttccgactccctccctcgtgcggaagggcggccaagaacctgcgggcgatccggaaggtatcgctcgctcatctgccaaggaggcaatgcgatgaagaagtttacgggtgcggcgacgatttcgtgcgcagtcatcgcgttggcgttgaccgcctgcgcgccccagtcgaacgaaaacggagccgcatcggccgacgatgcgaaggagaccccgatcacggttgcgtggtcggcggactcggagtgtggcacctgccatgcgaccgagcaggcgtcgtacgacgacgcggcttgcgtggccagcacgcacgaagggcaagcgtgcatttcgtgccatgctgacgcttccggtctggcgacggctcacgagggcaagaccgcgtccgataccatgcccaagaagctgaagaagacggaggtgcccgacgacgcatgcctgtcgtgccactacggtgctcgcgaagaactcgttgcagccaccgtcgacgtcgcggtggtcgattcgaaaggcacggcggtgaacccgcacgatgtgactccgagcgagcagcacgatactatccgatgcgcggattgccacggcatgcacgatgccgagaagcttgccgacaaagccgatgcggaatgcgcaagctgccatcacgccgacgtgttcgagtgctacacgtgccacgattgacgcgaccgctgcgcggacgtccgagaagggggcatgcgtgcaacaagctgcgcataccccctctgttcctcttgtggaacctcggtcgaaaccctcgcgcgcgcaccgcggtgcggtaccatggcgctcatggaaaccattaagcgacatgacaccggtcccgccgtcgaagacgttcagcagcgcctcgtcaccatcgggttgctcgactccgccgatgtcgacggggcgttcggcgatactacggccgaagccgtgcaggcgttctgcggcaacatgggcctgcccctgtccgaagaggtgaccgagaaggtgtgggcggcgctcgtcgacgcctcgttcacgctgggcgaccgcaccctgtacctgcgcatgccgcactttcacggccacgacgtgctggagctgcagcacgcgctggccgctttgggtttcgcatgcggcgccgtcgacggcatcttcggagcgttcaccgagctcgcgctgcgcaagttccagctcaacctgggtctgccgtccgacggcatagcaggtgcctacacgtacgccgccatccgcaaccttcatcattcatgggagggcaaggaggccgtgcacggctccagccacctcgggttcgcccgcgctgccgacgtgctggagcgcaacgcgctgtgcctgttcggcacgcaggactttacgcgcagcgtcgcatcgcgcatgtcgaatctcgcgctggccacgaaccccgcttccaagatcatgagcgccgattctctgctcgtcgcccccgacgagtccatgttgcttgtgcatatcgtcctgccgggcgagctgacggtgaccaccgtgccgcgcgtcagcttcgatgacgaggagacgctttctctgcgtctcgagacggctatcggcgtggccgacgccgccagtccgtcgcgcatcgccgtcgagcttcccggcattatgtgggaagacgcgggcgagggtcgttccgcgcagcatttcgctattacgctgctcgacgccttgtgcactgcgctgtcgtaagctcggcaccctgatcgtagacgctgcacccccctccgccattccgagcaagcgaggtcttcgggatgccatcctgagagagtgcggtccgctcccgtcatcctgagcgagcgaagcgagtcgaaggccgcgttgcgcgtggcgaggaggcttgcggcatctcctcgatcggaagctcgaacgctcgcgctctttgatcgaaaccttcctacaccagctgatgtattctcgtgtcggttcgatgacggatatgcaaaagttaatgatttccgcaggtgagggctttatactgctgtcaaacaccaaccgattcgaaagcaggttatcatggctgacgatacgaagaacaccgactctggcaccccgcagcagcccgacgcggctccgcagcctcccgcgacgcccccgaccgagccgttgcctcagcagcaaccttctatgggccagcaggttcctcccgcgcagccccagccgcagcaaccgatgtacggcgctccgcagcctcagccgcaggctttctacccgcctgctccgctcatgcagctcaccggcggcatgaagttcgcttggcttgtggtgggcgccttgctgggcattccgggtatcatcatcgcttggcttgtgaacgtcgacaagatgccgcaggtgaaaagcgatgccctcaagttcgccatcatcggtttcgtcatctggatcgtgctgcagttcatcttcggcatgatcgtgttcggaaccatctcggccgcgatgtacgggctgatgaactcggtggatatgggctcctacaactacggctaccacggatcttggtaatcgaccggataaatctgtaaatcgcttcacattggaagagcccagcggggctcttccttttgcgtgctaaagcgagtggtacaattgtgagcgatttccagggtccgtgcggggaagcgcgggcgccagagacccaccgcacaaaggagcacacatgccacgtcccatgaccatggcggagaagatcctcgccgcccatgcggggctcgacgaagtggagccgggtcagctgatcgaatgcgatctcgacctcgtgctgtccaacgacgtcaccgcccccattgccgtcaaagagttccgcaagatcggcgtcgagaaggtgttcaatcctacgaagatcgctctcgtccccgatcactacgtccccaacaaggacatcaagagcgccgagcaggccaagatcgtgcgcgatttcgcgcgcgagcagggtatcacccactactacgaggtgggctgcatgggcgtcgagcatgcgctgctccccgagcagggcgtcgtcggcgcgggcgacctcatcatcggcgcggacagccacacctgcacgtacggcgcgctgggcgcgttcgccacgggcgtgggctccaccgacgccggtgtgggctacgccaccggcaaggcgtggttcaaggtgcccgagtctctgctgttcaagatcgagggcgagctggctcccggcgtcaccggcaaggacgtcatcctgcacatcatcggcatgatcggcgtggacggcgcgctctaccaggccatggagttcaccggcagcgccatccgcgccatggacatggacgagcgcatgagcatctcgaacatggccatcgaggcgggcggcaaggccgggctcatcgaggtcgacgacgtgacgcgcgcctacctggacggccgcaccgagcgcccctacaccgagtaccattccgacgcggacgcgacgtatgcgaaggtgtacgagatcgacgccgcctccatcgtgcccaccgtgtcgttcccgcacctgccgtcgaacacgcgcccggccgccgaggcgcgcgacgtcaaaatcgatcaggccgtcatcggcagctgcacgaacggccgcatcgccgacatgcgccaggccgccgacgtgctgcgcggccgcacggtgcatcccgacgtgcgctgcatcgtgatccccgccacgcaggcggtgtatcgccagtgcatggaggaaggcctcatggacgtgttcctcgacgcgaactgcgccgtgtccacgcctacgtgcggcccctgcctgggcggctacatgggcattctcgccgcaggcgagcgcgccatcgccacgacgaaccgcaacttcgtcggccgcatgggcgaccccaccagcgaggtgtacctgtcctcgccggccatcgccgcggcaagcgccgtgctcggccacatcggcctgccggaagacctggactaggaggagctgcgatcatgcaattcaaaggaaccgcgcaccgctacgggcgcgacatcgataccgacgtcatcatcccggcccgctacctgaccacgtccgatccggcggagctggcgaagcactgcctggaggatctcgacacgtcgttcgtcgaacgcgtgcagccgggcgacatcatcgtggccgacgagaacttcggctgcggctcgtcgcgcgagcatgcccccatcgccatcaaggcggcgggcgtcgacgtcgtcatcgccaagagcttcgcgcgcatcttctaccgcaactccatcaacacgggcctcgccatcatggagtgccccgaagcggtggacgccatcagccagggcgacgtggtgtcggtggatgccgatacgggcgtcatcgtggacgagacgacgggccagacgtaccaggctcagccgttccccccgttcatccgcgagatcatcgaagccggcggcctcatcaaccgcacgaaggcgaaacttggcgaggagtagatcaatgaccaggacctataacatctgcctgcttcccggcgacggcatcggccccgagatcatcgccgagggcgtcaaggtgctggacgcggtgggcgcgaagtacgatacggcgttctcctacaccgaggcgctgctgggcgggtgcgccatcgatgcgtgcggcaccgcgctgccggacgagacgctgcgcgtggccgaatcgtccgacgccgtgctgctggcggcggtcggcggtccgaagtgggataccaccgaccccgcgaagccgcgtcccgagcagggcctgttgggcatccgcaaggcgttgggcctgtacacgaacctgcgtcccgtgcagatcttcgccgcgttggccgacgcgtccaccctcaagcccgagatcgtggacggcgtggacatgatgattgtccgcgagctgacgggcggcttgtacttcggccgccgcgagcgtttctacgacgaagaaggctgcggctcggacggcgccgccggccagcgcgcctacgacacgttggaataccgcgagtacgaggtggagcgcatcgcgcgccaggcgttcgaagccgcgcgcaagcgccgtaacaaggtgaccagcgtcgacaaggcgaacgtgctggaaaccagccgcatgtggcgtgagatcgtgcaccgcgtcggctcagaggaataccccgacgtggagctcgaggacctgctcgtggacaacacggccatgcagctgatcagccgccctgtcgacttcgacgtggtggtgaccgagaacatgttcggcgacatcctgtccgacgaggccgcccagatcaccggctcgctgggcatgctggccagcgccagcctcggcgacggcaccgccctctacgagcccagccacggcagcgcgcccgacatcgcgggacgcgggatcgcgaacccgctcgcgcagatcctgtccgtcgagatgatgctgcgctatagcttcgacatgggcgaggccgccgacgacattcgccgcgcggtgaccgccgtgctcgacgagggctggcgcaccggcgacatcaaacagtccgacacgcccgccgacaagctggtcggcacggcgcagatgggcgatctcgtggtgtcgcgtttgtagcgcgttccttgcaaagtaaaaaagaagcgccctgaacgggcgcttcttttttgtcagcggtctcgtttacggcttcggtcccttcgatacgacgatgaccaccttgccttcttgcacgctttggctgatcaccgtgccttccggaaccgtgtcggagtactcctcgatgtagcccgccttgtagccgttcagtatctggatggcttcctcgaaggtcttgcccacggcgcttggagccgagttcacgtccttctcgcggctttcgccgtcctcgtccttctcttcttccaccttcttgcccagcttgttcttctgagcgatgttgtacgggttgttgtacggcggatccgcgacggtggggaagttctcgatggccttgccgctggtcgcccgatccatgaagtccttccatagcgcgttcgccgtgagcccgtggtcggtctcaatagcgccggacgggtcgccgatccaagccgcgcacgacaggctgggcgtatagcccaccagccagtggtcggtgaacgagctggcggtgcccgtcttgcctgcaaccggctgcccgctgttcaaccgcgccgacgtggccgtgccgttgctctgcgtgaacaccgtttccaacaccttcgtcgtggcggcggcgaccttctcgtccaacacgcgtttgccggtgtcgctctcctcctgaggccagatgacgttgccgtcgcggtcgaggatctttgtgatcaccgtgggctcgcgtttcacgccgccgctggccagcgtggcgtaggcgctcgccatctccaacggattgacgtcggccacgccctcggttgcggtgtacacgggctgcatgggggaggtcacgcccaggcggctggccatctcggtagtggatgcctggccgatggagttcgacaggcgcaggtagccggtgttcgacgagatggccgtcgcgctttggatcgtctggatgccgtagtcgttgccgttgaagttctcgaagtcctcgggtgcgccatcctgtcccttcttgaggggagaggtgcaatcgaccagcgtctgaggcgagatgccctgttcgatggctgcggccaacgtgaacgccttgaacgtcgatccggcctggcgtcccgttccgccgtcgcccgtggcgatgttcacctggctttccccttcgccttggccgtacggcactccgcgcgtcatcgccttcacttggccggttgccacgtcgatggctacgatggaggcgtccaagttgtcggccatgttcgcgcgctggttgtccaccgccgcctgcgccgcgtcctgcagctcggggtcgagcgaggtgtagatggtcagtccgcctttgaacaggtcggcatacgagcatccgtaggggttgttctcgtcgaacagcaacgaacgcacgtagctggtgaaaaagggataggcgtagatgccgtcggctggtgcgtcgggcgccgggttcagccccagctcctcggcttgggcatcgtcgtgctcctgctgcgtgatgtcgccggccgacagcatgcggtcgagcaccacgttgcggcgcgccaggcaggcgtccgggtacaccttgggattaagataggtgggcgactgcgggatgcctacgagcgtggcggcctgcgcgagcgtcaggtcgagcgccgacacctggaagtagttctgcgcggccgcttcgatgccgtagcagccgtccccgtagttgatgatgttcaagtacttgaccaggatgtcgtctttgctgaagcgtttctccaaatcgatggccagctcggcctcgcggatcttgcgctcgaaggagatgtcggtcgcctcttcggacaacacggtgttgcgcacgagctgttgggtgatggtggaagcgccttccaggtcgccgccgcgcaggttgttgacgaaggcgcgcgcgataccggggatgtccacgccttcgtgctcgtagaaacgcacgtcctcggtgtcgacggtgccttccagcacgtatgggctgatctcctcgtacgttaccggatcgcgcttttccagctggaactccgccagcaacgtggcttcgtcgcctgcgtacatcacagattcgcgggatgtgttggtgaagtcggtgtcctcgatgctggggaggttcttcgtccagccttccatgacgccgagggcgccctgaactcctgcgtagccgacgaagcaaagggctgccaccgtgacgaggaggccccatttcaccgcatgggtgcgcatttcgcgctgttttctccgtattttcatcgttcgactatactaccatagcgctgataccgaaccgtaacgttcggtcggataaccccggaactctctacaccagctcgcatcctgttcgaaagggtgcaaaacgtacggctatatataggtaaggatctaccatgtctcatgccatcgaactgctcgcgcccgccggcaacgccgcggcgcttcgtgccgccgtgcgcggcggggccgacgccgtgtatttgggcctcgactcgttcaacgcccgccgcggagccgacaacttcacgcttgagacactggccgatgcctgcgcctacgcgcatctgcgtggggttcgcgtgtacgtgacgttcaacaccgccgtgctgccttccgaggtggcccgtgcgctcgaaacggtgcgccaggcgtatcgcgctggggcggatgccttcatcgtgcaagacatcggcatcgcatccgagatctcccgcgcgctccccgaagcgcgactgcatatatcgacgcagatgaacacgcataacgcggccggcatcgaggcggcggcgaggctgggcgcccagcgcgtcacgctggcacgcgagctgtccgtcctcgagatcgcccatctcgccgaggtggccgacggctacggcatggaggtggagtcgttcgctcacggcgcgctgtgcgtgtgctactccggccagtgcttcatgtcgtcgctcatcggcggccgttcggcgaaccgcgggctgtgcgcccaggcgtgccgtctgccctacacgctgcacaacgtggcgctgcgcaagaacctgcccgcgccgggcgagcatctgctgtccccgcaggacctgtgcgccatcgacttgctgcccgaactggtggaagcgggcgtcacgtcgttcaagatcgagggtcgcatgaagtcgcccgagtacgtgttcgccgtcacgcagacgtaccgcgccgtactcgatcgcacgctggccgagcgcgctgcgggaagcggcaaggacgtgcgggccgccgaagacgagcatcgcaccctggccgaggcgttctcccgcgggttcaccacggcctacctggagaaccagcgcggcaacgacatcatgagctacgggcgcccgaacaaccgcggcgtgttcgtgggtcgcgtgacgtcggcgaagaacggcgtcgccaccgtcgcggccgagcggccgctcgcaccgggcgacgtgttggagttctggacgaacaagggtcacttcgcctacacgctcgaccaggtgtctctcgacaagcaaggcaatgttcgcatggcgcccgaccgtccggtggggaagggcgaccgcgtgttccgcgtccgcagcgccgaagcggcgtttgaagacgacgtattcgagccgcgcgtcgcggtgacgggtcgcgtggtgctgcgcatcggccagccgctgcgcgtagagttctcgctggcgccgagcgctgcagcgcgtcatcctgagcgcagcgaggcgcagccgagcgaagtcgagggatcccgtgcggcgacagcccatacccccccgatcggcgcagccgaaggcgttgcgatcgagcccgcgcgtacgaagccggtgacggtcgacgacgtgcgtgcgcatgtcgatcgcctgggtcaaactccgtttctgctagaatcgctcgaggtcgaactcgacgagggtgtgggtatcggcttctcgcagctgcaccgcgtgcgcgccgccgcgctcgacgaccttgcgcagcagctgctcgcgcccacgcgcaaccgtgcgttgccgcgtgtgcgggagcgcacggcgcttgcgcccgcgcgcccgcgcggcgtgcgcatcgcggcgtgggccacgaatcctgcctgcgcacgcgcggcgaagcgggcaggcgctgacatcatctacgtgcctgcgctcaactacaagcgcggcgaggccgtggtggcgggccaacgttctgccactgcagagcaagcgggctatccgaagcaggccgtcgtggcgctgccaactgctgaacacgaccaggttccgggcacgcgcgaggcggccatcgacttcgatccttggcgctacgtcaagccaggcaagcctgtgctcgtggagaatctggccggcctcgtgcgcgccgccgagctgggatgcgaggtcgaagtagggccgcacatccccatcacgaatccgctatcgctcgcagcggccgccgagctgggagcgcgccgggtgtggctgtcgcccgagctcacgctgggccagatcgccgacatcgccgaagatgcaccggttgagctaggccttaccatcatcggcgcccaagagctcatggtcaccgagcactgcctgctcatgagccaaggcccctgcgacgagaactgcgccgagtgtccgcgccgcaagagcccgcattttctgcgcgatcgcaaggactacgagttcccggtcgtcaccgacgcgctcggccgcagtcacttgttcaacggtgttcagctcgatgtggcccagaccctgcccgacctcatccatgcgggcgtcacgtcgttcctggtggataccacgctcatgaacgtcgaggagaccacgaaggccgtgcagcgcgccgtccgagcgcgcaacgtggcccacgccgacggcaacgccatcgccaaaacccccggcaccaccagcggtcatctattcaggggcgtttcctaggctcttcccgccatcccgaacgagccttcccaccccgccatcctgagcgagcgcagcgagtcgaaggatcccgtgcggcgacagctgaatcgttgacagctgatcccgtgagagattcttcgactccgctcatctcgatggcgggcgcgccgttcgcacggctcctccttgctccctatggtagaatcatgagctacgtgtatagagaggaagagaagaccatgctttccgcggaagaacaactgcacaccatcgcttccggcgcagcgcagatcgtgccggagagcgcgctgctcgagaagctcaagcggggcacgccgctcaacatcaagctgggcgtcgatcccactgctcccgatatccatctcggccatgccgtgccgctgcgcaagctgcgccagttccaggatctcggccacggcgtgacgctcatcatcggcgacggcaccgcgctcatcggcgatccgtcgggtcgcaacaccacgcgtccgcagctcacgtccgagcagatcaaggcgaacgcccaaacctacgtcgaccaggcgttcaagatcctcgaccccgagaagaccgccctgcgctacaactccgagtggctgctttcgctcaacatggaggacctgctgaagctggccagcaacttcacggtggcccgcatcctcgagcgcgacgacttccacaagcgctacaccaacagccagcccatcagcctgcacgaattcctctacccgctcatgcaggcctacgactcggtcgtcatcaaagccgatgtcgagctgggcggcaccgaccagctgttcaacctgttggcgggtcgcgagctcatggagaagatgggaatggagccgcaggtgtgcctcacgttgcccttgctcgagggcactgacggcgtgcagaagatgtcgaagagctacggcaactacatcggcctcaccgacgagcctgccgatatgttcggcaaggtcatgtccattcccgacgagctcatggtgaagtactatcgtctcgcctcggcgctgccggtcgatcagatcgacgagatcgagcgcggtctggccgccgacgagctgcatccgaacaaggtgaaacgcgcgctggcgaagaatatcgtagccgcgtattacgacgaggcggcggcgcaggcggccgaggagcagttcgacctcgtgttcaaacagcatgccgtgccggacgacatccccgagttcgcagccgacctcacgcccaacgacgacggaaccgtgtacctggcgaagcttttggccgatgcgagcctggctgcaagcgccggcgaagcgcgtcgtcttatcgacggcggcggtgtcaaggtgaacggcgaagcgctgcctgcgaagtcctacaacgtggatcctgcgctgctcgcgggcgcgacgctgcaggtgggcaagcgaaagttcgtgaagctggtgtagcccgtttcctcgaatcgtgtaataatcggcaggcggctttcgggccgcctgctttgcttctggaaaagtttttgaaaatatttgcaaggattcgcgcccctcgttcgttttgcatatgaaggacgaagcgaacgacaacaggaggatcgaccgaaatgaagaagaacgtgatcgcaatcgtggcagctgtggctctcgtgctgctcgccgtgcccaccatcgcattcgccaacggcatgcagcaaacttggtgtccgtccggcggagccgggtcgctcgctcatcatgcgatgcgcgcagcgggagacagcgacgccggcgcgacggtcggcgcggctatcgccaccgtgcgcggcgagtacgttgatctcgacaacgacggcgtgtgcgacaactacggcaccggcaacggcaccggaggtcagggatcgtgcgccggctacgtcgacgccgacggcgacggcgtgtgcgacaactacggcgcgggccaggggtcgcgttctggctacgtcgacgccgacggtgacggaatctgcgacaactacggcaacggctatggctgcggtaacgggcagggcaacggcaacggctacggtcctggcaacggcaacggcgccggctacgtcgacgccgacaatgacggcgtgtgcgacaactacggcgcgggtaacggtcgcggccatcacggcatgcgccgctagcgaaagcgggcggtgcgcgtgcgatcggcaggagacatcgagagggcgatagagcggcacggcgatgcggtatggcgcgtcgccgtgctgtacttccacgctcacgccgacgcccaggatgcctttcaggacgcgtttttgaagtacgcgcttgccgatcaggtggcgttcaacgacgacgagcactgcaaggcgtggctcattcgggtgaccgccaacgtatgcaaggatatgctcaaggccgcatcccgtcgcgcggtgtcgctcgacgacgcggtttgcgcagcctcgaacgacccggccacgcagcccgcatcattctccagcgaggtggtggacgccatgcgttcccttgacgatccccctcgcactcccttgtatctttctctgtacgagggttataccgctccggagatcgcgcagatggtggatgctcccgtgaacacggtgtactcgtggctcgcgcgaggcaagaagcaattgcaggaggtgctgtcatgaccgacctcgatacgcgggtgcgccaggcgttcgataacgtgaccgttcccgacgacgtgaagcgtggcacccttacctatatagcaagcattgcggaggcgtctggcgtttcggcggaaacggctcccgcaagcgctgccgcaccgcgcaagcacgcccgcgcgcgcatcattcctctgcgtcgtgccgctgcggcgctcgccgcgtgtctcgcactggctttcgcgggattcggaggcttcgcgtacgcgcagcccactacctatgtaggcattgatgtcaacccttccatcgagcttggggtcaaccggtttggcatcgtcgttcgggtcgaggcgctcaacggcgatggggagtcattgctcgatgccgtgtcgcttacgggtcgcgggtatgcggacgctctcagcctcctcacgcaaagcgatgcgttctcgccctatgcgcaagaggactcgtacattgagatcagcgtcacttccgacgatgcacgacaggcggaggctatccgccagcagagcgacgcatgcctgagcgcgcttccctgccgcggctcctgccatgccgtcgacgagggaacgcgcgaagccgccgtctctgcaggcatgggcgtcggccgctaccgcgccgctctcgagctcgttgagctcgaccccagcgtgacgcttgaagaatgcgcgagcctttccatgcgtgagctgcgcgacagaatcgcggcgctttcctcaggggacagcgaaggaagaggctcagggaacggacagcacggccatggtggcggtgggggacagcacggcaaagggaatcgataatcaaccggtatgtgtggcactcgtggagggtgccacgttgttttgccggcgttattagatctttacctggggttttgccaatccgagcaaaaaaagtttgagattttgcaaaattacccattgccttacgtacaccttacgggtaatatacaaaacccgcgtttgaggaaagcgcggaacggatctctcctgaagcaccaaagagataagcaatctccgaacggcttcaaagaattttgaaaaaagttcttgacaggaaagaaacgatacagtaaagtatttcctcacgcgcttgaaacaaacaagcgcagcgggatccgaaaggatactgcagaaccttgaaaaccggatactgaacagcgaagaagagaaaagccaagcaaacgattcttgcgaacggaaacccggcccgagcgcgcaccctcaagacggggggcgggcgagggccgaaaccaagatcggacttcagcgggaagcgattcccgcctcttaaacggagagtttgatcctggctcaggatgaacgctggcggcgtgcctaacacatgcaagtcgaacgatgaaaccgccctcgggcggacatgaagtggcgaacgggtgagtaacacgtgaccaacctgccccttgctccgggacaaccttgggaaaccgaggctaataccggatactcctcgcccccctcctggggggcccgggaaagcccagacggcaagggatggggtcgcggcccattaggtagtaggcggggtaacggcccacctagcccgcgatgggtagccgggttgagagaccgaccggccacattgggactgagatacggcccagactcctacgggaggcagcagtggggaattttgcgcaatgggggaaaccctgacgcagcaacgccgcgtgcgggacgacggccttcgggttgtaaaccgctttcagcagggaagaaattcgacggtacctgcagaagaagctccggctaactacgtgccagcagccgcggtaatacgtagggagcgagcgttatccggattcattgggcgtaaagagcgcgtaggcggcctctcaagcgggatctctaatccgagggctcaacccccggccggatcccgaactgggaggctcgagttcggtagaggcaggcggaattcccggtgtagcggtggaatgcgcagatatcgggaagaacaccgatggcgaaggcagcctgctgggccgcaactgacgctgaggcgcgaaagctaggggagcgaacaggattagataccctggtagtcctagccgtaaacgatggatactaggtgtggggggctccgccctccgtgccgcagccaacgcattaagtatcccgcctggggagtacggccgcaaggctaaaactcaaaggaattgacgggggcccgcacaagcagcggagcatgtggcttaattcgaagcaacgcgaagaaccttaccagggcttgacatggacgtgaagccggggaaacccggtggccgagaggagcgtccgcaggtggtgcatggctgtcgtcagctcgtgtcgtgagatgttgggttaagtcccgcaacgagcgcaacccctgccccatgttgccagcattaggttggggactcatgggggactgccggcgtcaagccggaggaaggtggggacgacgtcaagtcatcatgccctttatgccctgggctgcacacgtgctacaatggccggtacaacgggctgcgagaccgcgaggtcgagcgaatccctcaaagccggccccagttcggatcggaggctgcaacccgcctccgtgaagtcggagttgctagtaatcgcggatcagcatgccgcggtgaatacgttcccgggccttgtacacaccgcccgtcacaccacccgagtcgtctgcacccgaagccgccggccgaacccgcaaggggcggaggcgtcgaaggtgtggagggtaaggggggtgaagtcgtaacaaggtagccgtaccggaaggtgcggctggatcacctcctttctagggagacacgatacgtgtccggaggggtcgagcgagagctcccccgcctggaaacaacaacaatctctttcgggtcccgtcgcgagggtccgcctggcctcttcgcccgctgtctcagcatccggcttccggggctctgcccccggggggcttcggcctcccgcgcaccttgacagttgcatagcgtttggtgactaatgatcttttttacccggccgtccgacgggcggccggggaccgagcatcatcacgatcgcgagagcatcgagtattcgatgcctgaaaacctgagttatgagaagaagatactaagggcgcacggcggatgccttggcacaggaagtcgaagaaggacgcggcaagctgcgataagctccggggaggcgcaaacggccttcgatccggagatctccgaatgggggaacccagcaggggtcatgccctgctacccgcgcctgaatgaaatagggcgcgaggaggcaacccggggaactgaaacatctaagtacccggaggaagagaaatcaaccgagattgcgggagtagcggcgagcgaaaccgcaccagcccaaacccatgcacgtgcaagcttgagggcgttgctgcatgaggggttgtgggaccgcgcattccatgggcctcagaccatggacgcagttacaaatccgcgcggaagcggaacggcctgggaaggccggcggaacagggtgagagccccgtacgcgaatccgcgcggactgcgagtgcggcgcccgagtagcgccgggcacgtgaaacccggtgcgaacctggggggaccaccctccaaggctgaacactctcctgtgaccgatagcgaaccagtaccgtgagggaaaggtgaaaagcaccccgagaggggagtgaaacagtacctgaaaccgtgcgcctacaagcagtcggagcccccgagcggggtgacggcgtgccttttgtagaatgagccagcgagttgcggtatgcggcgaggttaaggtttgaaccgagccgcagtgaaagcgagcctttaagatggcgatagagtcgcatgctgcagacgcgaagccgggtgagctatccatgggcaggctgaagcgggggtaagaccccgtggagggccgaacccacttcggttgaaaacggaggggatgacccgtggataggggtgaaaggccaatcaaacccggagatatctcgttctccccgaaatagctttagggctagcctcggccgttctccgacggcggtagagcactggatcgtcgagggggcttcaccgcctaccgacacgaaccaaactccgaatgccgccggatcagaggccgggagtcagaacatgtgggctaagctgtgtgttcgagagggaaacagcccagaccgcccgctaaggtccccaagtttatgctgagtggcaaaggatgtgcgtttgcctagacaaccaggatgttggcttagaagcagccatgcatttaaagagtgcgtaacagctcactggtcaagtggacatgcgccgacaattcacggggctaagcatgacaccgaagcggcggactaatctatattagtggtaggggagctttccccgcagcggagaagccgagagggcgaccctcggtggagcgcggggaagtgagaatgctggcatgagtaacgagagcggcgcgagaaacgccgccgccgtaagcctaagggttcctgggcaaggctaatcctcccagggtcagtcgggagctaaggcgaggccgagaggcgtagccgatgcgcaacaggcggacattcctgtaccgcctgcggaccgctatcaccgacggggtgacggagaagggtagccgagcggggttctggacgtccccgtgaaagcgcgtagggagcatcgcatggaaatcagcggcgcatatatcctgagacgcgagacgaaagcttatgctgaagtcggcgagcccatgcttccgagaaaaacctctaggaagggacgcaggcgcccgtaccaaaaccgacacaggtgggcaggtagagcataccgaggcgatcgggagaaccatggttaaggaactcggcatactgactccgtaacttcgggagaaggagtgcccctggcggtgacgggactagctccccgagcggccgggggtcgcagcgaaacggcccaagcgactgtttatcaaaaacacaggactctgcaaagccgtaaggcgacgtatagggtctgacgcctgcccggtgctggaaggttacgcggatgggtcagccgcaaggcgaagctctgaagccaagccccagtaaacggcggccgtaactataacggtcctaaggtagcgaaattccttgtcgggtaagttccgacctgcacgaatggcgtaacgatttgggcgctgtctcaaccatggacccggtgaaattgtattattcgtgaagatgcgaattacctgcggaaggacggaaagaccccgtgaacctttactgcagcttgacattgatcgttggctcggcgcgtagaggataggcaggaggctgcgaagcccgggcgccagcccgggcggagccgaccttggaatactgccctcgtcgcgtcggcgatctaacccccggccgtgatccggcggggggaccgtgtcaggcgggtagtttgactggggcggtcgcctcccaaaacgtaacggaggcgcgcaaaggtccgctcagaacggtcggcaaccgttcgcagagcgcaagagtacaagcgggcttgactgcgaggcccacaagccgagcagagacgaaagtcggttctagtgatccggcggcacagagtggaatggccgtcgctcaacggataaaaggtactccggggataacaggctgatcttgcccaagagtccacatcgacggcaaggtttggcacctcgatgtcggctcatcgcatcctggggctgaagtcggtcccaagggtatggctgttcgccatttaaagcggtacgcgagctgggttcagaacgtcgtgagacagttcggtccctatcctccgcaggcgcaagaggattgaggaggtctgcccctagtacgagaggaccggggtggacggacctctggtgcagcagttgtcgaccaacggcacggctgcctagctacgtccggcacggataaccgctgaaagcatctaagtgggaagccgtctccaagatgagtcctctttccggtaagggcccaggcagaacacctggtcgataggccgcaggtgcaaggcgtgcgagcgcctcagccgagcggtactaatagcccgagctcttcttcgcatgcatatccctcgggttgcgcgatcgaaagtcacgagcgctgtgcaaccgccagggtggcgcggggggatcccgcggccctgacggggccatacaggcccgcgcgggaacgccctgcgcgagcgcgaccatggaggcggggatcacccggtcccattccgaacccggaagttaagcccgccatcgccgaaagtactgcagcgtcaggctgtgggaggatagggcgtcgcgctcgcggagggcgtttcggcatgcggaggccccgcccccctcgggaggcggggcctccgcgcgttccggggctccgctcccctaggaggcgcgtggcgttccgtgtccggggtcttgaggctcatcccgctcgggagctggatcgcgaagccttcgagtaatccgtctccggccttattcgccctcttctttctcccattgtctactgcttcccttttccttgcgttccgcatgcgccgaagcgccgttgggacaactcgcttgctatatatgttgacaacatgcatgcttaaggagtatagatgttattagcatatagaggcgagcttgcggaaggaagtggggcctatgccgagagacgattgcggcggagagggtgcggcgcgtcagccgtgttgtcgacgccgcggaggcggcggcggggcgttggtcgagcctgccgcccttgcagcattgctgtatgcgggcggatatggctacgacatgcgcaaggcgatcctcgagcgtacgaatggcgaggtggatgtcgacgtaggcggcttgtaccggtcgctcagacggctcgaggacgaaggtgcggtggcatctcgatggtgcgacgaggacgttgggccgcgccgtcgcgagtacgagctgacgcagcagggagtcgaactggccgaacagtggctcgatgcgcttcgggcgcgacggcgcctcgatgatttgctggtcgagttgctggaaggcggcttggcggagctgaaacgaaacgacgtttgaagtattatccggacatgaatgaaagaagggcgagatgggcgagacgatgaagcttgcggtgccgacgatgggcgaagcggggttggaatccgagcgcgcggggcatttcggccactgcgactgcttcactgtggtggagatcgccgatggcgagatcacgggtacgagcgaggtggccaaccctccgcacgaggaaggcgagtgcatgcgtccggtcggcttgttggccaaagccggagtggacgctatcgtggcggcgggcatgggcatgcgcccgctcacgggcttcaaccaggcgggcatcacggtgtacttcgaaaaccagacgccgatcgtgggtgatgcggcgaagctggtggctgcgggcagcgtgccggtgatgagcgcggacaacgcgtgcaaccatcaccactgatcacctgtttgacgaggtcgttcgaacaccctcgaagcttgggcttcgagggtgttcttctttgcgcgtttgaaaggtcatgctatgctgcaaggaagcgaatgaaaggacgaagcggtgcggcaactcgatgaagaaggcagatatcgtctcggggcagcggaccttctgacgtcgaagcgctgcgtgctggaaggggcggtgcctccgatcgctatcacgcaggaggagcctgttcggtcgtacggttgggtgagcaaggggctgccgacgcccgccacgggcggactctatgttgtcgagttcttcggaaaaagcgatatcgcgatcttggcttatatcgatccgttcgggcgcgtgttttcgacgagcgaagcgtctgccgtgcctccggcgaggactcccgatctgacgttcgcgagggttccccagcaggctgccggagaagagctggggtgcgtgtacgtccatgaaagcgacgggtcgaaaaaagatgttgcccagtaccgctgcgcaagcggccgctatgcgctgttcgattcttggtacgacttcggcccgtacgacatgaacttgacgtacgaagacgcgatggctcgggcgtatttggcgttcgtgctgcgtccttcgctcggagcgccgtcggtacccgagcgcggcatcggcggcgtgttcgagcggctgaagggtgacaagcccttgacggcgatgcgatccatcgtggaggacgcgcgctgtgccgaggacgatccggtgtgcaagcctcctgcgctcgtcagctgcttggcgcactggctgaccgaggcggggctggacaaactggcaggggtcaaggacgaggcgctgcgcttggttcgcaccgtgcgctacgccaacacctattatctgggcgtggaagacggggaagctcctatcacgatcgagacggtgtgggcgatcgaggctgcgctcaatcggtttctgctggtaagcgaggcgttcggcgatcgcgcctcgatggcaacggaggcggattgcgctcggtgggacgcctatctgctggaaacggtggctgcgcagcgtccagtgatggacgggcctgcggatgcgcctgcggcagagcgggcgggcgaatggagcgtgcggtgcgcgataggggcgatgctcgagcggttgcggcttccggtgcgtttggacgcgtcgatgcgcttcgacgtggaggcgggggcggcggcgttcgatctgaaggttccgggcgcgtcgctcatgccgtcgtgggcgtggcgggaggaaagcggctgggtgcaggcgagcgagcgcgatcgggacgcgcaggcgcatcgctacgcgctgcatctggggctggtgctggctgctgctgcattcgacgcttcgtctggaatccgacgcgtcgacatcgtggcgcggccgtgcgagaacgcggcgccgagctcgagcgacgaaagtaagggagagtttccgcgcgagtcgtctgcgcgggcgttcgtgcagacgacgttcgctcgggaaacgtacgaggcgttcggacgcttcgaggatgcgcgcgccggcgacccgttgccgccgtatgcggcgagcggggcgatcttcgatgtggaggcggccgaagcgttcgcgtacgtcgacgcccttccgtcgcacgagctgcgtctgcagatgccggaagtggtcgacggggcgttggcggacgacatgcgcgtccagctgggcgccgagcgatgcaaggacatgcgcatcacctttcatgctgcgcgtcgccgcatggccgaaggccttgccgacgagatcgtgcgcgcttcgagcacggcggacgccatccggctcgttcgcgcggcgcaggaggaggcggcagtccaggacgacgaccgtacggtagcgtcgtgcacgcggctcatggcggcgcttgccgaaggcgagatcggcttgggcgatcagaacgcagtggtggcgcgcttcctcggagaggatcggtgccttgcggcgctcggacgtgctcggtcgttgtctacgagcggcgaccaggagacggcggtgcaggtgctcatcgatgccgtaggggaagcggcggccctcgacgggttcgtggacggcgcgaccaccgtgtaccgttcgttcgactcgtacgcgtcgcgcgtgctgtacaaccgtgcgcgggcgggtgcgggcgctccgtcgcgcgcttcggcggatgcgggcaagcgggtggaggtggtccccgattcctactacctgtgccatctggagatcacgcagcttttggagcactcgttcgagcgtaccgaagaggcgttgcggttcggccagcgcgccatcgagctggggcctgcgacggcagccggctaccgtcagctgggtcgcgcttacatgttggtgggcgacatggagaacgccgccgcggtgctggaggagggactgctgatcgccgtgcagcccagcgacatcgccatggcgtactaccagcttgcgtacgtgctgtggaaggcgggacggccgcaggcgggcgcggcatgctaccttaaatcgctcatgacctcgtcgtcgatggcgatgcaggccacggccgaactccaggagctggtggaggagacgggcgtggcgctgccgccgagggaagtcgtcgacgaagaactggcgaagcatgcggtgccggtggcgcctaccgccgaggtgctcgaagcgttgggctccggcgcgtccgctgccgtcgatgtcgggatgttccccgtcgcacgcaacctgctggccctgcgcctgcgctaccgtccggacgacgcgctggtgaacgtgctccgttcgttgggcgagtgatggcggcttcgcgggtgtttgcgctacaatagaccgattcagaatgcgagagacgaaggatacgccatggctttgcaagctcccgaaggaacgaaggacctcctgcccgacgaggcgaaattctgggcgcacttcaaggcgacggccgccgacatgttcggtcgctacggctatgtgactatcgagacgcccgtcttcgagcagaccgagctgttcgtgcgcggcatcggcgaggctaccgatgtcgtgtcgaaggagatgttcacggcgatctcgggcgagaacctgaacaagcttctgggcggcggcaccatcaagggcaagagccgcctgtcgctgcgtcccgaaggcacggcgggtgtggtgcgcgcggtggtgcagcacgatctggtgccgcagggcgcggctccggcgaagctcatgtacgcaggcccgatgttccgcgccgagcgtccgcagaagggtcgccagcgtcagttcaaccaggtaggcgtcgagtgcctgggcgccgaagatcccagcgtggacgccgagggcatcatcatgctcatgcgcttcttcgccgccatcggcattcccgtggacgccacgcgccttctggtgaactctatgggctgcgagcagtgtcgcccggcgtaccgcgatgccgtgaaggcgtacatggacgcgcatgcggacgagctgtgcgacgagtgcaagcgccgcgcggagatcaacccgctgcgcgcgttcgattgcaagaaccccgactgcgccgccgtgatggccgatgcgccgaagatcaccgagcacctatgcgacgactgccgcgagcactacgacaccgtgaaggcgtacctcggcggcgcgggcctttccttcgaggaggatccgaagctggtgcgcggcttggactactacacgcgcacggtgttcgaagtgcaggtgaccgagggtatgggcagccagaacgccatcggtggcggagggcgctacgacaagctggccgaggaggtgggcgggcgccccacgcccggcttcggcttcgcgctgggctacgagcggtgcgcgttggcgctgcaggcggcgggctacgagttccccgcggctcggcgctgcgacttcttcgtggcctgcgtggacgactcggtgcgcgcggaggcgttctcgctcgttcaggcttgccgcgacgcggggctcatcggcgagatggatcatcagcatcgcagcttgaagagccagttcaagctggccgacaagctgggtgccgtggtcgttgcggtgctgggtcccgacgagctggccgccggccaggtgaaggtgcgcaacatgcggacgcaccaggagagcgcggcggatctcgccgcgctgaagaagctgctggcgcatttcggcggcgagccgttcggtggagaggcggattccctcgaggctgtgctgggcaagctggaagcccgatagccgtcagcgtgcgggaggggcgatagcgagcaagacgacgaaggcggccgagaggccgccttcgcttgggagagggaggatcttgttagaggcttaccatttcccggcgctcaggttcttgccgagcaggtagccgaaggtggtgcaggccccgcccaggttgatgccgggcaccttgtagtcgtacacgtcgccgtacatgtctcccacgacggtgcccacgccgtacaggccggggatggggtcgttttggttatcgcacacgtgcatctggatgtcggtgttgaggcctcctgtgatgcatagcgtgtaaggctcgtttttgatgccgtagaacgggggctgcttcactggcagcaggaagcgcttgtccttgtggaactcgtcgtcgaggcccgtctcgcagtacgagttgtaccgttcgacctgggcgaggaactcctcgcgcggcagacccagaccgtcggccagctcttcgagcgtgtcggccttcacggcgttctcggccatcgtggcgtcgaagccggcgtactcgtcggtggtggtccagtcggtgttggggtcgaacagcgcctggatggcgtcgtagacctcctgcgtgtcgcgcggctcgccgcccacgcggtcgctctgccagggggcggagtcctgcacccagttctcgtcccagatgaggaacgcgcatccgtcgggctgcacgcgctgcggatagggcatgtagccgtacgtgcagttttcgttggagtagcgcacgcccttcttgttcaccagcaggccggggaacgtggtgagcgcgccttccgcccaccagcggcagggcagcacttcgtcgcccatcgtggccagcatgggggcgttcggcgtgtacttctgccaggacgcgccgatccacagcgccagcttgaggccgctgccgtcgtagacgccgccgtagccgaagggcagcgccatggggcagtacttcgccaccatgtccttgtcctgcgagaagtcgcccgtggccagcacgacgcccttcgtggccttgtagcgggtgtactcgccgtcgcgcttggccacgcagccggtgacgcggccggtgttgtcgccctcgcggtcgagctgcacggcggtggtgctgaagaagacctggccgccgcccttctggatttcctcggtcagcgcttcgacgacgatctgctgcgacgcgccggccgcttgggcaccctcggcgacgaaggagtgggatacgttcagcgttttgagcgggccgccgtcccaccagtcggtgccgccgtcgcgctggttgttctcgatgacggcggagatgccgtagggctccatcttgtccatgagccagttcatggcgttgccggactcgttgtagacgagccaccacttctcctggtcgaggcggaagctgttcgacgcgaagatctcctggaagatgggttcgatctcctcgcgggtgaagtcgaggcccagctcgtgggtgaggcgcgtgttgaacgccgcgttggagccgccgcgcgacacggggccgtcgctcgaggcgattaccacgacgtcggcgccttcctcgacggcggacgtggcggtgacgaggccgcccacgccggcgccgatgacgaggatctcgcattccacggtgtttccgatcttgctctcgtccacgggctcgggcggaatctcgaagttccacttcgcgttcgtgaatttctcggcgtcgagcacgaggtcgcccgatgcggcggcgacggtttccttatcctgcggcgcgcatccggccaagccgagcgtgcccgctgcggccgcggcggctccggccaccgtggcgcccttcaggaagctgcgacgatccatcgaccttgctgttcccatgttccctccttcgttcggatgatcccctgccgagcgctgcggcgacgtctttcgcttcgtcttgcgcgacgctcgacgggatgtagcgtatgcccgatcgggccggcgcgcgtcactcaaaacgtggcattggcgggttcgaaggcatgcgggcgcgcatctcactcgaaatgcgttattccttggcggcgctgtcatttatactggcaccatggcatcgcgtccatggaaggggaatcatggaaaaggggagggccgataccgaaggaggctccacgctgttcgtccgcccgacggtgctggacgcaggaatcggggtgctgtacttcttcacgtcgcatatggtcatccgggcgatgtactcgatcggggttgatcgcacgtcgacggagctgtccgtgttcttcctcgtggtcatcgcatcggtcatcgcggcgcatctgctgtcgaagccgctgctgcgggcgcgccggttcgcggaatcggctttggggataccggcggtcagcgtgacggcggcgttgggagccacgctcgcgctcgtgtcgatgctgccggtggtgggcgtggggctgttctatgcgtcgggcgccttgctggggcttgcgtgcgggtggatcatcgtcatctggacgtcgaccatccacgcttcgcggcccgagagcgcctcgttctacctcgatccggcgctcgtggtggccgtcgtgtgctattttctgttccgctgcgtcagctcgttctcggacacgatcgcgcaggggttcctgctcgcgctgccgctggtgaccatcgcgtgcatcatccgcgccgccaagcccgccgacgagggcgatgcgcccgcgctgggcgaggggacgcaggcgctgcaagtgctggtggcggttgcagcggcgttcgccatcggctgcagcgtgaccgtgtacttggcggggcgcgagaacgacgtgttgtcgtcggggcttaactacatggtgctgttcgaggtgctggcggtcatcctcatggcgttctgctgctggctgatgagccggttctcgcagcaacggggcgcgctgtcgccgcgcggcaccgcggtgctttcgttttgcgtgtgctatctgcccctgttctccatcgggctggtgatgggcggggcggccatcccgtcgaacgcgccggacgcgctgtgggagagcaacgtgtgggtgctgctcatcgccatcttcgcttacgacatccgcgattcggtgtacgccatccgcgggttggccgtggggctgatgttcgaggccatgtgcatcggccagctgatcgcgcgcgtgtccacgctgagcttctcatcgtgcgcgcttgcggtggccggggcgctgacggcgctgtacttcttcagcgtgggaaggcagctgctgcgcggggtgccgaagaggaagcagccgcgcgaggaggagaggcgggccgaggagccgcgggcgcgcgccgaggcggagacggaagacgaggcgatgccgtccgagatgctggcgtactgccgcaagctcgcgctggagaacggcttgacgccgcgggaggccgagatactcgggctcatcgccatggggcgcagcgcgaagtacatcgccgaggagttgacgatctcgcacaacacgacgcgcacccatatcaagcacgtgtacgagaagctgaacatccactcgaagcaggagctgctcgacctcgtgctgttcgggtcgggattgatatgaggcgcgcccgcgccgccggggcgggcggcgtgttcgcgaggggcgggataggcaaacgtcttaaaaggcggctgcccctatttacggcattgatcggtgtcgcgtggggcgccggtggcgtttgagtgctcggtcatgtatactacatgcatatcgcagtttcatgaaaggagccctcatgccggcgttgcaggtgcgagattttcccgacgatttgtacgagcagttgaaggcgtatgcggccagccagcatcgcagcatcgcgcagcagaccatcgtggcggtggagcagatgctggaggccgccgacgcgcagcattattgggacgggcatgacctgcaccgcctggagcggcgcccgcgttacttcgacttcgacaccgaggcgaagcgagccgtgcgcatcgagaagcgcaaggagctgttcgcggagatcgacaagctgccgaaatttgacgttccggatgattttccggacacggtggaactcatacgccagggtcgcgaggagcgggatgcgattatcgacgcgatgattgctgccgagaagcagaaggcggtcgaagcatgatagtccttgattgttctgcggcggttgacatggtaagggagaccgaagccggtcgagctctgaggcaattgatgcttgaaggagaagaggtaatcagctctcagctctttctcattgaggtgtcgaatgctttttggaaataccataaagcgggtcttcttgatgagaaaacggtatgcgccaacatcgagaaagcgatcgctctcgtagacgagttctgtgatcttgataaaacccagtgctgcgaggccacgaaagaagcgatgcgcttgcgccatcccgtttacgacatgctgtacttcgtgctcgcgcggcgcaatgcggccacgttgttcacgctggatcgcaagctgcagcagctgtgcttggacaacggggtggactgtgtgctgaccgatacgaacttctagcgggtcgttcgcgcgcattttgcatgaaaccggatacctgtttcgacccgcgcgccttcgatactgtacaatggctaagtttgagtaacgtttgccgcgtcacggaggggcggcgaatgcagatagcagtgctgaggagcaaggaaccaacgttatgacggacttcatgaacgaatactgcatgcacaccgccacgtgcggcgagctgcgcaaaggcgacgtcggccgcgaggtcgtgctgtgcggctgggcgtggcacaaccgcgaccacggcgggctcatcttcgtcgacctgcgcgaccgcgcgggctacacgcaggtggtcgtcgatcccgactgcgtgagcgccgacgacttcgcgaaggccgagcacctgggccgcgagtacgtgctgaagatcgccggcaccgtgcgcgagcgcggggcggaggccgtgaaccccaacatggccacgggcgagatcgaagtgctggcgaagtccgtcgaggtcctgaacacgagcgtgacgccgccgttctccatcgaggacggcatcgagacggacgagaccacgcgcatgaagtggcgctacctggacatccgccgtcccgagatgtatcaggccctgcacttgcgccacaaggtggcccaggccatgcgcggcgcgctgaacgagcgcggcttcctggaggtggagacgcccatcctggcgaactccacgcccgagggcgcacgcgactacatcgtgccgagccgcccgaacccgggccgtttctacgcgctgcctcagagcccccagcagttcaagcagatgctgatggtgggcggcatcgagcgctattaccagatcgcccgctgcttccgcgacgaggacctgcgcgccgaccgtcagcccgagttcacgcaggtggacatcgagatgggcttcgtgcagggcgaggacgtgatgaacctcatggaggacgtcatggccgagacgttggcggccgtgggcgtggagcacgccttcccgcttcagcgcatgcaataccgcgagtccatggaccgcttcggcaacgaccgccccgacacgcgcttcggcatggagctggtggacatcaccgacatcgtgaagaacacgggcttcaaggtgttctcgagcgtggcgcagtccggcggcgtggtgaaggccatcaacgcgaagggcgcgggcgactggagccgcggcgacgtggagaagctggccgacatcgcagccgagaacggcgcgaagggcatggcctggatcgcgttcacgaccgacggcaaggagaagagccccatcatcaagttcttcagcgacgaggagttcgccgcgctgaaggaggccatggacgtggagccgggcgaccttctgctgttcgccgccgacacctacgaggtggcgagcgccgtgctgagcgctctgcgcctgcacatggccgatgcgctgaacgtgccgcgcgagggccatcagctgctgtgggtggtgaacttccccatgttcaagtacgacgaggacgagaagaagtacgccgccgagcatcatccgttcacccacgtgctggacgaggacgtggacaagatcgagagcgacccgctggcatgcggcagctacagctacgacctggtcatggacggcttcgaggtgggcggcggcaccatccgtatccacaacgccgacgagcagcgcgccgtgctgcgcacgtgcggcttgacggacgaggagatcgaggagaagttcggccacctcatccacgcgcttgagctgggcgccccgccgcatggcggcatcgcgctgggcctcgaccgtctggtcatgctgctgggcggcaaggcgtccatccgcgacgtcatcgccttcccgaagacgagctccgcgagcgatccgatgaccggcgccccgagcgccgtgacgggccgccagctcaaggaagtcaatctgcgcacgctgtagggaagcgagcgaaagaacgcatcgaggggcccgttgatctcaacgggcccctgttctatccgaatgcgttgtcgtctgcgccggactacgccgctggttcgccggtctgggccttgtcttccaaaggcttgcgctgccggttcaggcgatcgaacttgttcttatcggtttcggccatgccttggccgggatcgtgacgtttatcgaacagcggatcggcggggtcggtccagatgcgctcggccacaggttcccattcctcgatggaacgcgtgcacttggcgcacaggtcgcgcgcgctttccttcgcctgcaggtcggtggagtgggcgccggcggtttccaccatgtccgccagcacgtcccggttctccaagatggggcagggacgcagcaagttgtcgttgaacggctgccgctcgtagtactgcatgaagatcggagatttcagggcatcgagcaacgtcgtctcgcgtatgttcgcgttggcgtagtgcgcgaacacgcacggctccacgtcgccggcggcgttgatatgcagatagcgtcgtccgccggcgatgcatccgcccacgaactcgccatcgttttggaagtcgagggtgaacagcggtttcttgctgcgcatctcgcggacgaagcggtagaggcgttcgcgctggtcggcttgcaccatgagttcgacgggcgcgtccacgcctacgggcatgtaggtgaatatccaggcgaataggacgccctggccgatcatccagtcgaagaactcctcggaggcgatggaatcggcgttggctgacgtgtagcagcacgagacgccgaaggggagcccgtgctgtttgagcaggcgcattgcccggacgaccttttggtacgtgccctcgccgcggcgtccatcggttgcttcctcgaagccttccacgctgatggcggggatgaagttcttcacgcgcagcaaatcttggcaaaactcttcgtctatgagcgtcgcgttggtgaacgagaggaacgagcagtcggaatgcgcttcgcagagcgcgatgagatcccgcttgcgcacgagcggctcgccgccggtgtagatgtacacgtaggtgccgagctcggtgccttggcggataatggagtccagttcgtcgtaggagaggttttcctggtgaccgtactcggcggcccaacaaccggtgcagtgcaagttgcaggcgctcgtaggatccatgaggatggcccagggcacgttgcagcggtgcttctcgcgcatggtctcctgctttggccatgccatgaggttgccgtcaacgaggaacgtcttgatgaagtcgttgcgcatcacgggattcagctcgagcaagcgcgtgatgagctggtaccaattgctctgctggtcgatagcgttgcggaaggcggtcctctgactggggaacaagtcggcaggtgctaccttgtccagcatatccatgatcttggtggcgttgcgctcggggtcttccaagagataatcgagcgtcttctcgaaggccgcgtgcttgatctgatcggttgccttcatcgcttcctcctctaatgcattgattgttccacgaatgccgaataatcatcttacgtagattccggtaacgaaatgaagaagggcgatcgccaagttggaaacgaatggatctatctgggtgttctgcagaggatcgggttcgatcaacttagctggaaagacgacggcttgcgacggcgcggcaccgcaaggcaaaggattcctgcggtctcgacggcgaacgcgatggtcgagactgtgtgcttttggttgcttcagagggttggggttcgaccggattttgcgcttcctttatactggagcggttgttgttttgagtatctcgaatgggccggggcggcgccatgttccgaacctggtcaggtccgggaggaagcagccataagggaccgctggcgagcgcccctgcctattcgagatacttttttgtatcgggctgtgaccgcgaggacgacatggacatcatcaatttcttcgtcaacctgctctcggatccgcggggggctatcgcgggctggatcatcgcgctggggccgctgtgggtgtactcgccgctgtttctcatcgtgttcgtggagacgggtcttgtgttcttcccgtttttgccgggcgattcgctgttgttcgcggcgggcgtgttctctgccgacggtggagggttgaacgtctgggctacgctcatcgtgttctacgttgccgctatcttgggcaacacgtcgaattactggatcgcgcggttcttcggcgcgcgcatcatcgattccggcaaagtgaaagcgctcacgcctgaacgcatgagcaagctcgaccatttctttgccaaatacggcgggctcaccatcgtcatcacgcgcttcatgccgttcttccgcacgttcgccccgttcattgcgggtaccggccatatgaacttcggcaagttcacgctgttcaactgcatcggcggcatagcctgggtcagcctgttcgttttggtgggatacttcttcggcggtattccgctcgtgcaggatcacttcgaggtcatcgtgctgggcattgtcgccgtgtcggtggctccggctatcatcggcgccgtcaaggccgctatgagctcgcgcaagaagaagacggctgacggacgcacgcaggcccaagccgggatcgatgccgaattggtcgaggagctcgagctgcgcggcgctcatgcggcagtcgaagaagggctctccggcaagcatgcggcccctgtcgcgaaggcggttcaggagatgccgcacggcgctcatgcgaaggcggagtccgaaacggagtagcagggaagagggcgtacgcgatggcagaggcactttaccgtaaataccggccgcagatcttcgaagacgtcgtcggtcaggagcatatagagcgcacgatcaaaaacgcgatcgaacaggacaaggtgagccacgcctacctgttcacgggtccgcgcggcaccggcaagaccaccacggctcgtctgctggcgaaagccttgctgtgcgaatgcggccctacccccgagcctgacggcacgtgcgatgactgcgtgatgattgcgaacggcgaacatccggacgtctacgagctggacgccgcgtcgcgtacgggcgtggagaacgtgcgtgaggagatcatcggtcgcgtccagttcgctcctacgcgcgggcgctataagatctatatcatcgacgaggttcacatgctttcgacggcggcgttcaacgcgctgttgaagacgctcgaggagccgccgagccacgtggtgttcatcctggccaccaccgatccgcagaaggtgcccgagaccatccattcgcgttgccagcggttcgacttccgccgcatctcggccgagtccatcgtgtcgcgcctgggtgccatttgcgtgtccgaggacgtggagttcgagggcgaggcgctcgatctgatcgcccatcgcgccgaaggcggcatgcgcaacgcgctgacgtcgctcgagcagctgatcgcgttcggcgagggcaaggtgacgatggaggtggccgagaggctattgggctccatcgacacgaacgacctggccgagatcgtgcgcgcaatcggtacgcgcgacgtggcctcgtgcttccgctggacggcggagtacgtggaaacgggtgcggatctggcgcagttcgtgcgcgatttggccgagcatatgcgcaacatgtacgtgctgtcgctggcgggcgccgacgtggcgcttgaggtgagcgaaaccgtgcggcgcgagcttgcgagcgagctgccgctgttcggccctgaccgcctggcgcgcctgctgggcgtgctgggcgacctgtcggccgagttgaagacgtcgacgaacccgcgtctgtcgttcgagatcgcgctcacgcgcatggtgcggcccgattccgacttgacgctggaggctcttgccgagcgcatcgaggcgctggagagcgggcactccgcggttgcgcacgtgatcgggggaggggctgctgcggttgccgcccctcaggttgcggcggcttcggctccccaggtttcggttgcgcccgcgccggcttctccgcctgcatcccctgcgacccagggggcgccgatgcccgcctcccagccttccgcggctcccgcttccgctcctggtcccgatcgcgcatcgtcggccgaacgcgctggggcggtgcctgccgcgccggtgcaacccgtcgctgctccgcaggttgcggcgccgtcgcgcgaggcgggcggcgtcccgccgcaaggggcggagggcgtttcggctcctcgacccgcatcgcccgtgacgcaatctcaggctccgtccgccgcggccccctccgaccagctcaaggccagcctgcagaatccggccgccttgcagcgcgtgtggcaggcggtgctggcgacgctcaagaagaacaaggctgcttacggcgtgctgttcctcaacacgaaagcggtgtacgacgcgggcaaggacacgttgatcatcgagttcccggccgagaactcgttcgccttcaaggcggtgcagaagcccgacgtgcaggaagcggtgtcggtcgcgctcaaccaggcgtgcggcgagtcgttgcacttcgcgtacgcgcagggcggcgcggttgccacggcggcggctccggccgcgcgtcctgccccgtcgccgacgccgcgtccgacgcctgctccggcccagcgcccgcagcagcctcagcaggcggctccggcggtttctgctcccgcgccgcgcccgaagcccgtgccggactacgacatacctccgtacgaggacgaggtggttccgtacgacgacggttacgtctcgtccgcgccgacgcccgcgcctgctccggatccagcttcggcgccgacgcctgctgccgtcccggctcccgcggctccggctccggtggatgctcgcacgtcggcgacgcccgagcctgcggtgcagcaatcgcccgaagagctgcaggccattctggccgccggtttcggcgatggcgtgcgcgtcgaagaagtgagagaatagcgcgacagctagttcgccgcacgtatgcggcttgttcgaaacgaccatgacagataggagacgacgatgtcgaaacgaggcggttttcccggcggcggcggtaacatgggcgccatgatgaagcaggcgcagaagatgcaggccgagcttgcgcgcgcccaagaggagatcaaggacatgacgttcgaggccaccgccggcggcggcatggtgaaggtggttgcgaacggcgacatgaccgtggacagcatcgtcatcgaccccgaggccgtggatcccgaggatgtcgagatgctgcaggacatggtggccgccgcggtgaacgaggcgctgcgcggcgtgtccgaaatcagctcccagcggttgaacgccgcgaccggcggcttgaacattccgggccttatgtaacctggttcggatagaatcgcgatcatgtacgctgtgccgtccattcagaaactgctcgacgagcttgagcgcttgccgggcgtggggccgaagtcggcgcagcgtatcgcgtactggatcctcaacgccgacaaggcgacggcgctgcgcctgtcggaggccatcgccgaggtgaaggaaacggtgcgcttctgctcgcgctgcttcaactacgccgaggacgacctgtgcgagatctgccagtcgtccaagcgcgacgcgggcatcatctgcgtggtcagcgagccgcgcgacatcccgcccatcgagcgcaccgcggtgtacaacggcgtgtaccacgtgctgggcggcgccctttccccgatggagggcatcggccccgacgagctgcgcatcgcccagcttatgaagcgcctcgcatccgacgaggtgcgcgaagtggtgctggccacgaaccccaacgttgagggggagaccacggcgacctacctcgcccgactcatcaagccgctcggcatcgccgtcacccgtcccgccagcggcctgcccgtcggcggcgacctcgagttcgccgatgaggttaccctcggccgcgctatcgaagccagacggccgctgtaggggaggcgggcaggggagtttactcctctcgcttgcgagtttaatcttgccgcgaacgtatcgaagcgagcgtatgaagtactatgggacgtatggcgacggcattgacgggtgatgtcgggtgccgaaggggcgagggggacgtatgagggcttggccggcggcgaaatacctgacgtactgtttctggcgttcgtggatcctcgtggtgtatacggcgccgatctggagctacgtagcgaacgggacagggtccgcatcgtgctcgttctccatgtatgcttggtcgaccgttgcattcgcgctggtcgcggctctgttggcgttgttccatgaaaaggcttctctcgttttggcgcgcaagggcgttatgtgccttgcgggcgtaatctcgtcggtcggcatgttgatggaatatgcgggcgcgtttctgttctttgacggagccaacctgctgttcgtgtcgggagcgctcctaacgggcgtcggcaccgcgttcattgccgtacgcgccggtcagatctacgcggcgacgcgtccggtggtggccgtgacgaacacggcgctgtccgagttggcctccgggctcgtcttcttcttcgtggtgggcactgtgccgcagatcgcgctgttggtggcggcgctattgccgttggccgccgcgttgatgacgctgttcgagtccgacgcggacgcgacgcgcggacttgtgcgtcgccgcgcggccgacatcgatgcggccacgcgtcgtgcaagcgtcttcgcgttcgcgcgcttcctcgtagtggtgttcctgctcacgttcatggcgaacctgtcgaagggcgctttcgccctgcaagatgccgaggcgtcgttagcgagcggcacgataggcgtgtcgctggtcattttggtcagcttcgtgttggtgctggtgagcagcttgctcaaatcgttcgatttcggcgtggcgtattacccgctcgtgctcatgctcgtgctggccgtggtggtggtgttctcgtcggatgcgggcaatatggccgctgcggcggtgatcgtgctggtgtactgcttgttctctctgttcatgtggtgcttgctgacgtatttggctcgcagcgattattggagttcgattcaggtgttcgggtacggacgctcggttttcgcgctcggttcgttggcagggctcgtcgtggggcagggttacccgcttgccgagatggatggctctgagtcgttcatcgtcggcttggtgttggcgtttttgctggtggcagcatccatgctgattttcagggaaagcgatgtgcgcaagatcaccagcgcgggatggctggcggtcgaagcggtggccccgaaatcgtcggtatcggacgggctcgatgtcgttcgcgatgccgtcgtcgcagacgactctcgcgacatgttttccgaggaggtgatcgccgagatggggtccggggtcgatgccgatgggttcgcggccgatcacaacctcactgcacgcgagcgcgaagtgttcgagcttatgctgcgcggccgcgatgcgaagtccatcggcgaggcgctggtcatctccgacaacactgcgaaggcgcatatccgcagcatctacgccaagacgggcgtgcacacgcgtcaggagttcatcgacgccaccgagcatgtgatgcgctgagccgttaacgatctcgcctcccctcgatggccgcctctgcggccattgctttgtctaagggttgtttctcctgatgaaaagacagtttactcctgcagtcagccggtttagcccttccaggcgataggcgagcgccttcgtcgcgcgcacaatctctctcgtgaaggtcgcaggaacgttctacccctgcggccgtaaggagacgagagagaaaggcgatgtgtatgagtcagctcaacatgtcgaggcgcgggttcgtgaaagccgcagccgccaccggagcgcttgccgcattcggcgcgacggcggtcgacggcgcgacgttccgcgaagcgcatgccgacgagacgacctcccaaacaaagaaggtctacacctcgtgccaagcgtgcatctgcagctgcgccgtcatcgcgacggtgcgcgacggacgcgtcattcggctcgaaggcaatccggaaagccccatcagccgcggaggcctgtgcgcgaagggcctttcgggcatccaagcgctgtacaacccctgtcgcaacaagtaccccatgaagcgcgtgggggagcgcggcacgaacagcttcgagcgcatcagctgggatcaggctatcgaggagatcgcgcagaagctcacgcaggacttcttcaagtacggcggcgagtcgctggtgacctctacgggcggcggcgggaacccgcacttcagctcgccgtgtcgcttcacgcaggcgttgggatcgccgaacatcttcgagccgggctgcgcgcagtgcttcctgccgcgcatggccacgttctcgctcatgtacggcggcagcaagtcgggcaccacgtcgatggccgattccaagtacggcggctgttcgtcgctgtacttcccggaggacaatcctatccagacgctggtcatgtggggcacctgcaccagctaccacgcgcccagcggttcggggcgcgccattgccgagctgcgcgcacgcgagcaggggctcaacatggtagtggtggaccctcgcttcacgcccgatgcggctatggccgacgtgtggctgcccattcgtcccggaaccgacgtggcgcttatgatgacgtggatccgctacatcatcgagaacaagctgtacgacgaagatttctgcaagcgttggacgaacctgccgtacctcatcgacaccgatacgaagaagatgctgcgcgcctacgaagtgggcctgggcgaagccgatgcggaagatgcggaaaagacgttcgtggtgtgggatcagaagacgaactccgcgaaggcgctgccatggccgtacgacgaagcgctggaccccgcgttcttcggcacgtacgagatcgacggcgtcgaataccccacggcgttcacgctgctgcaggagcgcgtggacgaatggacgctcgaaaagggctgcgaggtatgctgccttgagaaggaccaggtggagaaggccatccgcatctacgcggagaacgcgccgtccggcctggttctgggcgtggccaccgacatgagccctcagtcggcccagggtacggaaggcgcctgcatcctggagttcttgctgggcaacgtggagaagccgggcgcgctgctgcagcgtttccccgacccgccgaacaaggtggatctcggcactatgaacacgctggtcacaggcgatatgctggagaagcgcctagggtatcgcgagcacaagggcctgggcatctggtcgcatgcgcacatccccacggtgttcaaggccatcaccacaggcgagccgtaccagccgcgcaactggatggaacgctctggcaacaagcatgcgatgatcggcaacgcggggcagctgtccgagatcatcgacaagatggagatgatctgccatctgtacatgtaccccacggccttcaccatcgaagcggccgattacgttctgcccacgcaggagtggctggagagctatttcaccatcgcccatgcgaacaagatcatcatccgccagccggtggtgcacttgtacgaaacggtgaacgagggcgtcatttggtcggagatcgcgcatcgttgcgccgagctgggcaatccgttcgctcagaaggccttcgacaaggaatacctggcaacgctgggcaccgatctggtgtactggcgcggccagcaggaaatgatggacttccatatgggctcgctgcctatgagctgggacgaactggccgagatgggcgcgtacgagtggatctccaaggaagactacctgacgtattacacctacaagaccatcgatccgaagacgggcaaggagaagggctggaacacgccgtccaagaaggtcgagccgtattcggaaggcacgctcatgctaggccgcacgggcgagccgtgggcgagcgccgagggcaaatcctacgtcatgccgccggccgacgaagattacgatcctttgatctactatctggagcccgaggagacgaacctcaccgatacggaatatcccatcatgctgacccagggacgcattccgcactaccatcacggcacgttgcgcaacattccgtatctgcgcgagctgtatccggtgccgctggtcagcatccatcccgagaccgccgagaagtacggcgtggaggacgagcagtgggtgtgggtggaaagccgtcgcggcaaggtgcgcgggaaggcgcatgtgacggcgggcatcgcaaaagacgccgtgcacatggaacgcttctggaatcccgagtacctggacaccgacacgccgagcaaggcctggactgagatgaacgtgaacatcctcaccaagaccgacgggcgttacagccccgagcacggcacgtacacgctgcgcggcttcacggtgaaggtgtacccggctcccgaaggcgcgcctgaaggcgcatggatcaacccgaccgatttcgaaccgtggatgcctgaattcagcgaatccactgaggtggtgttcaaataatggctcattacgctatcgtcgtcgatctcgaccgctgcatcggctgccacggctgcgagatcgcctgcaagaacgagaacaatatcgcattgggcgagtactggaacaaggtggtggaacgcgggcctttcggcgaatatcccgatttggagatgtatttcctgcccaccatgtgccagcagtgccaggatgcgccctgcgtgaacgtgtgtcccaccggggccagctatcgcgacgccgacggcatggtgctggtggacaaggagaagtgcatcggctgcaaatactgcatgatggcctgcccgtacggcgtgcgttcatggaacgcggccgagagcgtggtggagaagtgcacgctgtgcgcgcatttgtccaagaacggcgagcttcccatgtgcgtgcgcacgtgctcggccggcgcccggttctacggcgatatcgacgacccctcgtccgatgcgtcgaaggctcttgccgcggccgatcccgccagcatccacaccctgcaagatgtggggaaccatccggcgacgcactacattctgtcgccgaaacgcgccgcttggaaggaaggtgagtagccatgacgatccagtggtctttggttctgttcacggtgctgtcgggatgcggtgccggactgttcgcctgcacggccctcgatgaatttcgcggaggcgcggcgtcgaaggtgcgcttgccggcatgcgcggtggcggtggcgctgctggtggtgggcggcatcgcgtcggctacgcacctgtcgcacgtcgatcgcatgatggcggtgctggctcatcctacggcgggcatcttcctggaagctttgctgctgggcctgctggcggtttgcatcgcggtatacgcgctgctggtgaagcgcgaggcatcatccggagcccgcaaggcgctcgccgcgacgggtatcgtgctggccgtggcgttcgcgttcgcctgcggcgtgtcgtacatgatgacgtcgcgcccggtctggaacaccgtcgcgcttccgttggcctacttgggaacggcgctggcgacaggtgcggcgttgtacctggtgatgtgtgcggcgctcaaggttgacgagggcgacgtgaagaaagccggcgtgtacgcggcggcgggcggtgcgctgtcgctggtgttgacggtggcgttcggccttgtcagcggtaccgccttcggcgatcaggccgcgctcttctgggtggccgtggtgctgtgcggttctgcggcgccggcggtttgcggcgtgctggtcgcgcgtaaatccggcggcgcgctttcgttgggcgtggtggcgctggcgggcgccctggtgggctccgtcgccgttcgcgcggtgatgtggctggtaggcacggcagtggcgaactacttcgggttcgcgttgtaaccggagatcccccgagcgccgtatcgcgcggcgcccgggttcgaggatgaaagcaaggcgagagtatggctgactacacaaggcgagcctttctgggattcaccgccgccacggccgcgctcgcgggcgtgggcgcctcggcgatcgccttcgcgggcgagggcgggctgctgcgaccgccgggcggccaggacgaaggcgcgttggtggctgcatgcgtgaagtgcgaccgctgtcgctcggcatgcccgacgaacgtggtgggggtagcgcatgtggaggatgggctgctgcaagctcgcacccccgtgctcgacttccacaaagggtactgcgatttctgcggaaagtgccagacggcctgcccgaccggggcgttggggtcgttcgatccccagcgcgacaagctgggcgtggcggtggtgcagaaggaccgctgcatcgcgtacttcgaaggatgcgtcgaatgcgagaaggcgtgcccgtacgaggcgatcgcgttggacgatgtcgggcatccggtgatcgatgcagcgaagtgcaacggttgcggcgtgtgcgagaacgtgtgccccgcgctcgtgtaccgttcgttcgcgggcgggtctcggcggggcgttgtcgtggtggcgcccgagcgctacgagcgtttggggaggacgacggttgagggcgagagcgagatgatcgtatgaaacgggaagggaagcggcgcgtgagggcgtcgacgttgcgcgtgctgagcgcgctcggcgtcgcggctctcgtgtgcttggggctggcgttgcacaccggcaccggaacgcccagctcgttcggcatcgcggacattgcggcgctctgcccgctcggcggtgtcgaggcggccattgcttcgagaacggttgtccctcccctgctcatcgggctggcgatggtcatagtgctgacgctgctgttgggccgggccttctgcgcctggggctgccccgtcccgttgttgaggcgggtgtttcgaggaaagaaggcctcgaagcgcgatgcttcttcacgggattccgggcctctcgatgtcccggcgtccgagcgcgggggtttgcgcgattcgcgcaactgggtgctgggcggggccatcctctcgacggctgcgttcgggttcccggtgttctgccttgtgtgcccggtcggtttgacgttcggaacgctcgtcgtggtgtggagggtgttccagttcaacgaggtcacctggtcgcttctggtgtttccggccatgctcgtgctggagttggcagtgctgcggaaatggtgccatcggttctgtccgctgggagcgctgctgtcgttggtgtcgcgcggcaaccgcacgttccggccgcaggcgaacgtcgggacgtgcttgcatgcggctcacggcgagcgctgccatcggtgcgccgacgcgtgcccggaaggcatcgacttgcatgatcgggcggcttccgctccgctcaacgagtgcgtgaagtgccgcgagtgcgccgacgcgtgtcccgtgcacgctatcacgtttccattcctgtccaagaaacccctgctcgagccttctgcggccgagcgcgatacgaaggaggagcaatgagcgtcgaagaggtgttcaaggctgcaccgggatgccagaaggtgctgatggccgcgttggaagcgtgtcgtacgccgcgcacgcccagcgagctggactcgatcatggacgaggtgctccgatgtaaccgttcggtctatcgtccggcggagctgcgcgcgctgctggagcgctacggcgcgctggcatacgaacccagcgaggaagagcaagcggcgcaagctgcccttgaaacgggaggggaacctgaacttgttgtagacgaggacggcaacttcgtgacgactgcgccgaccgagggcgtatgggcgatcaccgaagccggcgctgcgtatctcgattccgatcctatcggcgcgaaggcgcaggcgctgctggccaaggacgcggtctacctgccggtgtatcgcgccttgctggagttcgccgccgaatgcccacgcgacaaaagcgccatcgacgcggtgatcgaccctcatccgctcgtgcagaatccgcgcttgttcgccggatatttcctgggcgagctggagcgcatagatgcaatggagtgggccgatgcctggcatgtcacggagcgcggtctcgacttgctggaagcgctgcgcgatggagaagacgacgaaagcggcgttgccgcgaaggaggcatgatgattgacgagggaatgcgcgccttggccgaggcgctccggcagcagagtgcggcgtacgggttcgtggcgcgtttgttgcgcaccgaggtggatgacgaggctctcgggaggctgcgcgcgatgaggtttcctgccgcgagcggcaacgatcatctcgatgcgggctatcgagggttgtgcgcttatctgaacgcaggcggagagcgccagcacggcgatttggccgtggacttcctgcatacgttcatcggcgtgacgcaggatcgagagcaggtggcttttccgtacgagtcggtatacacctcgcctgagcatctgctgatgcaggatgcacgcgacgaagtgctggcggcgtaccgtgcggcgaaggtggtgttggtggacgaagcgtgcgagcccgaggatcatctggcgttcgagttggagttcatgcagctgttgggagagcgcgccgccgaggcgctggaagcgggggacgatggatcgtgcgcgaaccttttggaggctcgccgtgcgtttctcgaggagcatctgctgaactgggttcccgatttcgccgacgacgtgcaacgcgttgcacgcacgggattctatcgggcgttggccgacatcgtgttaggggtgcttgaaacggatcaagcgttcctggaagacgtgctggacgatg

SEQ ID NO: 46 - DNA, 299688 bp, Eggerthella lenta
  source 1..299688: mol_type = genomic DNA
ctccccctctcccgcggagaaggcagcccgagcatgttacccgcttccggccccgggcgcaagggggcatttcgggtttttttcggacaagggcttcgtgccgtcgggccgacgaagtcgtgaccgcatggttttgcggttaggacgaacgctcgcttatattagtataggaagcgaatgaaaggagcttgcgccatgccgaaccagcccgacctcgatccgaccgtcgtcatccctttgccgcagcgcacgcttgccgccctcgatgcgctcgaaaacgccggcttcgagacgtggatagtgggcggatacgtccgagacgcgctgctcgggcggccttcctccgatatcgacatcgccacgcaggctcactggcaggacgtgcagcgcgttttcgaagggcaaggctatcgcacccacgagaccggaaccgcgcacggcacgctcaccgtgatcgtcgacgaacaggcgctggaagtcaccacgtaccgcagcgacggcgcttatgccgacgcgcgtcatccgaaccaggtatcgttcgtgcgcaccatcgccgaagatctcgcgcgccgtgatttcacgatgaacgccctagcctatcaccctgcgcgcggcctgttcgacccctacggcggacacgccgatttggaggcgcggatcatccgagccgtaggcgaccccgatcggcgcttctccgaagacgccctgcgcatgctgcgcgcctgccggttcgccgcggagctgggcttcgccatcgatccgaacaccttcgaaggcatgctggcgaacaaggggctgctgccccgcatctccaccgagcgcatcacacacgagttgcagcgcctgttgcttggagagcatgccggacgcgcgctcacggccacggtcgacgtgctggctgccgtgcttcccgagctcgtggccatgaaaggcttcgagcaacgcacgccgtaccatatatacgacgtgctcgaacacacagcgcgcgtgctggacggcgtgccgccttacccgcttgtccgctgggcagcgctgttccacgacatgggcaagcccgcggcgttcttcaccgacgaagacgggacggggcacttctacgggcacgccgccatcagcgtgatgctggcgcgcggcatcatgggccgactcgcgctgtcgtcggcgttcgccgcacaggtgctgacgctggtcgaacgccacgacgacgtgatcgatcgcacgccgaaagccgtgaagcgcgcgctttcgcgcctgggcggcaacgtcgagctgttcgccgccctgtgcgacctcaaacgcggggacgcgcgcggccaggcgcctcgctgcatcgaccgcgtgtccgatgccgacgagctggagcgcatcctgtccgagatcctcgccgccgacgaggcgttctcgctgaagaagctagccatcgacggtcgcgacgtcatcgagctcggcgtgccgcagggtcccctcgtcggcctcgccttgtcggatgcgctcgacgccgtcatggacgagcgcatcgacaacaaggcgtgcgctttgcgcgctttcatagaggaatggcgcgccgagcatgaagatcgagcccctctataacggccgagccaccgcccggtgacggcttcccgcatgccgatcgaagcacgcgttcgctttctatactgacatacgcgcatcacgatcatccctggaaagcgaggcacctcatgaccacaccctccgcaaccgcccagtcgcagccggaagccgccgtcgacgcccccgtcgatcgcatgagcatcacgatatccctcaacggaccgtatctcgtaaacggaggggtgcccttgacccaggaggtcatcacccccgtcggcggccatcgcgagtaccgcacggcgcgcgcctttccccaccaggaaacctacacgctgtgccgctgcgggcagacgagcacgccgccgttctgcgacggctcgcacgttgccgccggcttccacggcgcggaaaccgcgtcgcgcgcgtcgttcgaggagcgcgccgacatctaccctggccccggggtgacgctgtacgatgacaaccgttgcgcgttcgcccgcttctgccaccgcgaggacggcgacgtatggacgctcaccgagctgtccggcgacgagcgcctgaagcgcgaggctgtccaggagtccaccgactgcccagccggaaggctcgtgcacgtcgattcggagaccggagcgatgtacgagccggagctcggcccctccatcgccctgctcgaagaccccgaggaaggcgtgagcggccctttgtacgtgcgcggcggcatcccgctcgtcggcgcggacggcaccgagtacgagctgcgcaaccgctatgcgctgtgccgctgcggcgcgtcgcgcaacaagcccttctgcgacgccatgcacgtgaccgtgggctacgaagacggtttgaacggataaacacctggtaaacgccggaaaatcgcacgcttgcgtcctgtccgaccatccaattcgtcaacttttccaaaataatttgccgataaggcttgacgaagcgccgcataccccgtaatataccaactcgcgcttgcgactgttgtttaaaacaacaggagcacatcggttagccgatggggtgtcgtctaatggcaggacagcggtttctggtaccgtatgtgagggttcgactccttccaccccagccatttttacggtatactgcacagcgcactatgtggctccgtcgtctagcggtttaggacgccgccctctcaaggcggaggtcgccggttcgaatccggtcggagctaccaagaaattgcaggccaggagcgcacaagctcctggcctttttcttttcgatcgtctttcgtgtgccaaaatgtgccatcttgcggaattacggtgccttacgcccttctcgcctaaagccttctaccgccggccgcgcatgctgtcgtacaatggcggcgaacgaagagaaaaggaaacctcatggagcaagaacagaaccgcgcacccgagaccccagctggcgcccctgcggaactgccgttcggcgagcccctgctgatctgccccgggctctaccgcgtacgcgtgccgcttccccataaccccctgcaggcgctgaactcctacatcgtccttggagacgagacgactacgatcatcgacgttggcttcaaccacccggcatgtgagaaggcgcttgacaaggcgctggaatccctcgggcgaacctgggacaccgtcgagatcgtcctgacgcattcccatcccgaccatacgggcaatctcgatcggatctatcgcgacggtatgcgcgtgtatgcgaacctccactcgttcaaagaggtggagaatctcatgcagatgcaagcgaacgtgttcggccccctgcttcgcaaggcggcgacgccgcagcaaagcggactcgtgttccgcaagggcaagcatcgtctgcacatatcggccgagctgctgccgctgacgtgcaagcccgatctcatctacctgcacgagggcgacgtgctgcgcgccggaagtttctcgttcgaggtgatcgaaacgccaggacacgatccgtggcatatctgcctgtacgagcccgaccgcaagctcatgatcatcggcgaccacgtgctggagcgcataacgccgtcggtatcgtcgtggttccccgcgtacaacgccctcgaggagttcttggagagcttggggaagatgtactcgtacgacgtcgatctggtgcttccggctcacggaacgccctacaccggactgcgcgaacgcgtcatgttcctgatagcgcatcatggggagcgcctccaggaactgtacgacctcgtggccgccggccacgacgacatcgtatcgatatcgtcgcatgccaagtggcgctacgagaattggaacgaatggccgctcgaccagaagttcttctcgatgggcgagacgatggcccacctcgtgcacctcgtgtgcgaaggcaagatcaagcaaaccatctgcggcgacgagtaccgtttcgagctgccgtagcgccgcagccgcgttagaagggagcatcacatgcacatcgatctgatcatcgagagccgaaacgtgttcacaggagtcggcgacgtcgcccgacctgcggccatcgccgtcgcgggcgatcgtatcgtcgccgtccgatcgcgcgaggacgtgcgcgccttcgcgctcgaagcgaacgcaggcgggggcgcgcccgaggtgcgcgacttcggagacgcgctcgtggttccgggatttcacgactcgcacctgcacttcttccattcggccgtgtattcctcgcccttggcgaccatgtttctgggcgaaagcgagaccgactgcgtggcgcgcatgcaagcgttcgcgaaagaccggccgaacggctggcttctggcgcagggatggcgcgaataccgctggaacccgccagtgctgccgtcgaagcgctcgctggacgaggcgttccccacgcgtcccgtggcgctgtactcgggagacgcgcacacgctgtggctgaactcggccgcgctcgacgagctggggctcacgcgcgacagcgtgccgccggcaggcggctcctacgaccgcgacgagacgggcgagctgaccggcatcgtgcgcgaggcggccgccatggagttgatgccgcagatcatggggtcgttcaccgacgaggaggtggccgacgcttaccgcggcttcttcgcgcggctggccgagaacggcgtgaccagcgtatgcgacatgtcgctcatggcccatccggggctcgacttcatccgggacgacgtgcacgcatccctgctggagcgcggcgagctgacggcgcgcgtgcacctcttccccaccttgctcgacgacatgagccgcttcgaggacatgcgtgcgcgctacacgggtccgtgcctgcaggcacccggtttcaagcagttcttcgacggcgtgtcgagccagcataccgcctgggtgaccgaaccgtacgcgaacgcgcacgtcgaaggcgattgcggccgacccacggtagatcccgagatcatgcgacgctacgtgcttgccgcagccgaacaaggcttccccgtgcgcatccacgccatcggcgatgcggccatccatgcggcgctcgacatcttcgaagaggcgcgcgcgaaattcggaccgctgccggaggggcggcgaaactgcctggagcacctggagaacttcctgcccggggatatgaagcggctggccgatctgcaggtggtggccgccgtgcagcctcctcacatgacgctggatcccggcggccccgagcgcgatctgggacccgaccgcgcgaagtacatgtggcctttccgcacgctgctggacgagagcacggtgctggcgttcgggacggactcgcccgtggtggacgtgaactcgatggacgtgctgtacagcgccgtgacgcgacaggatccaggcacccacgagccggcgggcggatggctgcccggcgagcgtatcggcatggccgaagccctgcgcgcctatacgcagggcagcgccgcggcggcaggacgccgccgagagctgggcacgctggaagtgggcaagctggccgacatcgccgtgctcgaccgcaacctgctggcctgcgacgccgacgacatccagaagacgaaggtgctggccaccttcatgggcgggacgtgcgtgttcgagcggtgacggatcggagcttcgcgctaagcgcgaaacgggcgcgcaggtcggcgtagtaagtcagcgagggcggccatggtgcccgagatcgtggggatggcgagggtgaagcgtacctcggtacgcgagccctcggcatcgccgcaagatcgggtgccatgggcggccgcagcatcggcatgttccggcggccggaaggccgccggaacctaatactcccacatgtggtcgagggggccgcttccctttcccaggttgaggccggcggcgagggcgccgcgaacgtagtcctttgcggcgcgcaccgcttcttccatcggaagacccttggcaagcccacaggcgatggcggacgagagcgtgcagcccgtgccgtgggcgttctcggtgtcgacgcgcggcgcgcgcagccacacgacatcgccctccgccgtgaccagcacgtcgtcggcgcgatcatggcgatgaccgcccttcacgagggcagcgcccgtccccgcctcggcaaggcgcagcgcggcgcattccatcgacgcctcgtccacaacctcgaacccggccagcaccgcagcctccggcatgttcggcgtgaccacgtccgcgagcggcaataggcgcgccttcaaagcttcgatcgcatcgtcgccgatgaggcgggcgccgctcgtggccaccatgacgggatcgaccacgatattggcggctgcgtggcgctcgagcgcgtcggcgacggcttctatgatggcggccgacgacaccatgcccatcttcacggcggcaggccggatatcctcgaacacggcgtcgatctgcttcgcgacgaacgccggatcgacgtcgagcacgcccgtcacgcccagcgtgttctgcgcggtgagcgccgtgatcgccgtctcggcgaacaggcggtgcgcggcgatggtcttgatatcggcctggattcccgcgccgccgctggaatccgaacccgcgatgctgagcactgcttccatagcgctttcctttctatcggcgcgcgtcggctatgcgccgagcgccgcttgcaccgccgcccgcaaacgacgcgtctcttcctcgatatcctcagccgcgaagatggccgacaccaccgccgcgccgtcggctcccgtccccgcgagctcggggatcgtacgctcgttcaggccgccgatggccaccacgggaatatcgacggcggcgcagatggcggcaaggccgtccgtccccacgtcggcggcatcgggcttcgtgggcgtgccgaacacggctcctacgcccaagtagtctgcgccgtcggcctgggcgaccaacgcctgctccaccgtctgcaccgacacgcccacgatggcgtcgggccccagcttctcgcgcgcctcgacgcatgcggcgtcatcctgccccacgtgcacgccgtcggcgcccgcgatgcgagccgcctccacgtcgtcgttcaccacgaacggcacgcccgcctcgcggcagagcggcgcgagcgcccgggcgcgcagcaccacctcggcctggggagcgtccttctcgcgcagctgcacgaacgtcgcaccgcccgcaagcgcctcttcgacgcacgcggaaagcgtgcgctcgcccagccacgcgcgatcggtgaccgcgtacagcgccatcgcccggcgcaggttctccctcgggtacatgcgctcctccttatgctagctcttcgacccgcgcgcccgcttccagggcatcgccatcgaggttgtacagggcgtccagcaggtacgtgcggaacgacccgttgccgtcgtagccgctcatgcggccttgggcgatctgacctgccagccccatgccggcgacggcggccaccgtggcgtcgagcagcgcatcggggttcgccgtcacgaacgccgcgcacacgcacgacagcatacagccggcgcccgtgatgcggcccatgaggggactgccgttgcgaacggcgtaggcgcgctcggcgtcggccacgatgtcgatggcgcccgtgacggccacgacggcgcccgtcttcgcggcgaagtcgcgcgcgaacgccgcgccggccgccaggttgtcctcagtgaccgcatcgccggggcacacgtccacgccgcgcgtggccgccgcgccgcctgcgagcgccttcgcctccgacatgtttccgcgcacgacggacacggccagcttgtccagcaggtcggaagccgtgcgcgtgcgcagagccgacgccccggcgcccaccgggtcgagtacgatgggatggcccagctcgctcgcacgctcgccggccgcgaacatgccccggatggagcgctcgttgagcgtgccgatgttcagcgtgaggccgccgcagatggacgtgatgtcgaacacgtcggcgggctcgtcgctcatgatggggcttgcgccgatggccagcagcgcgttcgcgcagtcgttcaccgtcacgtagtttgtgatgttatgcacgagcggcgtcgtcgcccgcacgttgtccaaggccctcttcaaagcgaacggttccataggctactccttcccgagatcgaccgtcaggccgtccatgatggtgttcacggttcgcatggcgcacatctcgccgcacatggtgcaggtgccgtcggtcgagggcggagcgctctcgaagtagcggcgcgccttgaccggatcgagcgcctcggcgaacatgccctcccagtccacgcggcgccgagcgtcgctcatgcggttgtcgcggtcgcgcgctccgggcaccccgcgcgcgatgtcggccgcatgcgcggcgatcttcgtggccacgaggccctcgcgcacgtcggcggcgtcgggcaggcgcagatgctcggccggcgtgacgtagcagaggaagtcggcgcccgaagccgcggcaaccgcgcccccgatggcggccgtgatatggtcgtagcccggcgcgatgtcggtgaccagcggccccagcacgtagaagggcgcgtcgtggcacagccgcttttccagcttcatgttggcggcgatctcatcgagcgccatatgcccggggccttccaccatcacctgcacgcccgcgtcccatgcgcgcttcgtgagcttgccgatctcgatgagctcggcgatctgccccgcgtcggtggcgtcgtacgaggagccgggccgcatggcatcgcccaggctgatggtcacgtcgtgctcgtgcaggatggccagcacctcgtcgtagaactcgtagaaggggttctcgttgccggtggcctccatccacgcgaagatgagcgacccgccgcggctcacgatgttcgtgaggcggcccgtctcgcgaaacgactcgatggtgcgccgattcatgcccgcgtggatggtgacgaagtccacgccgtcctctgcatgcgcgcggaccacgtcgaggaagtcctccaccgtgatggtgatcagcggcttctctagatagccgatggcgtcgtacatgggcacggtgccgatcatggccggcgacttctcgatgagcgcgctgcggaacgcgtgcgtcttgccggtgttcgacaagtccatgatggcctcggcgcccagctccagcgccacgtccaccttcttccattcctcggcctcgtcggcgacgtcgcccgaaatgcccaggttcacgttcaccttcgtgcgcaggccgccgcccacgccttcgggcgacaagctggtatggtggatgttggcggggatggcgatgcgcccggccgcaaccccctcgcggatgaactcggggtcgcgcccctccttctcggccacgatggccatttcgcgggtgatggtgccggcgcgtgccgcgtcgatctgcgtcatagaactcccttcgttggcattacccatgtcaggttcctcgggtcgaagcgtgaatcggcgcttcctctcagcctgcccggccgcgatgcggctgcaagctccccggtatgtcaagccgtcgcgcatgcgacggagcgtttaaccagtatacgccagcgggtagaacacgtacagcgtgccctcctcgacggctaccgtggcctcctcgccggtcagttcgttcgacagcccgcgcgaggtgcggttcgacagcggctcgtcgtcgatggagtactccatgccgcgctcgatgacgccgcgcgccatgtcgttggccgagaacaccgacacggttcccccgccaagcgccggcagctcgaacacgtcgggaccggtgagcagccgcacggcgtacgtgtcggcgacggcggtcacgtacacgtcgcgctcggagaacttcgcgaacagctgcaggttcgccagcgtgtggtcgagccgcgctcccagcgcgccgtagacgatcagctcgtcgtggccccaggacaacgccttctccatggccagctccatgtcgctcttgtccttcttgaccgggtggcgcgacacgcggcggcacttcggcacatagccgagcgagtcgaagtcgcccacagccatgtcgggcaccgcaccaatggcctcgaggtgcgcgaagcccgcgtccaccgcgatgacatagtcgaactccccggccgcctggcgggccttgaagtcctccgcgttgaaatcgaccgcccccacgagcgcgcacgtagccatgttccacactttccttaccttcgagccgtaccgatcgtgatagaataccatacgcgagcgggccagacgatcgcgcgcttcggcgtgaggaaagtccgggctccatagggcaagatgacagctaacggctgggcggggcgacccgacggaaagtgccacagaaaagaagactcccccgcgaacacgcgcttcggcgcgcagaaacgggagaaaagctgaaacggtgcggtaagagcgcaccagcgcgccggcaacggcgcggcttggaaaaccccatctggagcaagcgcaaataggaacgcgacacggttgcccgccgtacgttcgggttgcgtgctagaggcgtctggcgacaggcgttcgagataaatggtcgtccaacgacagaacccggcttaccggcccgctcgcattctttttttccacgttttccgtcacacttccgacattcgaccgtctaacctatcgaaggaaggcatcgggcgcatcgcagagcgcccggccgacgacgagacgagcggaagcgcccggcgggcctttcgcggaaggcggcaccatgcatcgcgaagaattatcgaaagaagcgcagctcgacctggtggacaaggccatcgtaggcgacggccaggcgttggaggaactgctgcggtccacgagcgggctcgtgttcaaccttgcgctcaggttcctgggcaccgtccacgacgccgaggacgcgagccaggagatcgcagtcaagatcatgacccggctctcgacgtttcgcaaggagagcgcgttctccacatgggtgtaccgcatcgccgtgaaccacctcaaggactgccgcacgcatcagttcgcgaacgccccgttcagcttcgagatgtacggggccgacatcgtcgacgagcgcgcgaaggacgtccccgacctgtccgaaggggtcgaccgcggcatgctggcgcgtgagctgaagctgtcgtgcacgaacgtgatgctgcagtgcctcgacgccgacagccgctgcgcctacgtgctgggcaccatgttcaaggtggacagctccaccgcggccgacgtgctgggcatcacgcccgaggcgtaccgccagcgcctgtcgcgcgcccgcaagacggtcgccgagtttttgggcgcgtactgtcagcacggcggcgcggagacgtgctcgtgcgagcggcgcgtgaacttcgccatcgccacgcatcggctggccccgcacaacctggagtacctcgagctcaccgaggaggagcgcgcgcaggacgccttcgtcgacgccatggacgagatggacggctacgccagcctgttcgaccggcttccctcctaccgccccacgccgcgcgccaaggagctgctggaagcgtgcatgggcaccgccagcttcgacgccgtggtgaacgccggcaaggaggcctcccatgcctaacgtcctcatgctggatttcctggccgacctgcgcgagaacaattccctcgactggatgcacgcccacaagaagcggaagaaggaggcgcagaacgcgtttctggagctcgtgcagggctgcatagccgacctcgcggaaacggagccgtgcttggcggcgctcgatgccaaggacctcgtgttccgcatcaaccgcgacacgcggttcagcgacgacaagtcgccgtacaatccgacgttccgtgcgcacatctcccccgccgggcgcatgccggtgcccgtggggtacttcgtcagcgtgacgccgggcgggtcgttcgcgggagggggcctgttcgcgccgcacttcaaggacgccacgcgcatggtgcgcgaccgcatcgcagccgacccgcaggccttcctcgacatcgtcgaggcgccggggttcgccgagcgcttccggttcgtcggcatgccgctgaagaacgtgccgaagggctacgacccgcagagcccggccgctgagtacctgaagtgcaagtgctgggcggtggaagagcacttcgacgatgccgtcgtcgccgacgacgaggcctgccgccgcgcgctgctggacagcttcgcggccatgaagacgttcaacgagtacctgaacgaggcgctgaaaggcttcgcgatgccgacgcgctagggcggtttgcggcccggccccggcgcaccccgttcgattgggcgcaaaacgatagccatggcaaaggcagtcgaagcttcacggatggttcggtattgcgcgggcacataaggcctggtcgcagattccgcatacgaggaatctgcgaccaatgccccgcgttttctgccataggttgcaattcgcgcccaacgtttaccggacggttcgcgatgccaggcctgcggagccgcatcgcagaaccctacgccgggaacagcgtgtaggcccgtccctcggcggcctcgtgcggacggatgctcacgccgaaggctcgctcgatggcgccggttgcgagcacctcttccaccgtgccggccgccgcggcgcgcccgcgttccatgaccagcaaacggtctgagtagcgcagcgccaggtcgagatcgtggatgaccatgacgatggtcttgcccgcctcctcgttcaagcggcggaccagctccatcgtctcgtggcaggcgcggatgtcgaggtaggtggtgggctcgtcgagcacgatgaggtcggtgtcctgcgccaacgtcatggctatgaacgctcgctggcgctcgccgcccgacagccgcctcagctcctgcgtccgaaaccgcgcgatgcccgcaagctcgagggcgcgctccacgtgctcgcgatcctcgcgcgagagcttcccctgatgcgcctggtacggatagcgcccgcatgctacgagcgcctccaccgtcatcgccggagggcggctggcctgggccagcacggccacccggcgggcgcgcgccttcgccttgagcgacagcgtgggcaccccgccgacgcgcacctcccccgcctgcggccgcagcaagccgtcgacgagtttgaccatcgtggacttcccgcagccgttcgggccgacgatgctggtcaccgccccatgcgaaaacatcgcggaaagcccctcgatgaacggttccttgccgtaggagaacaacacctcgcgaagctcgatagcgggaacacaggggtgcgcgacctctgcggtcgaggagccgagggccgagaggtccgccgcgagtttccccgaggggacttgcttcgcggcgccgcgacgagccgaacagcccagcgggctgttcgtacgagcaggactgtttgagcgccgaacctctcggccctcggccccgcaggatgcaggcgcattattcaaggcttcccctcctgttcttcaagatgaggtagatgaagaaggggccgccgaggaacgccatgaggatgcccaccggcacctcgtagggtgcgaacagcacgcgcgccagcaggtcgcacacgacgacgaacgccgcgcccgacacggccgacaacggcagcacgatgcggttgtcgtgcccgacgaagaaccgcacgaggtgcgggatgatgagccccacgaaccccagcaggcctgcgaagctgacggccgcgcccgccagcacggcggcgaggcccagcatggccagccggcacgcgcccacgttcatgcccagcgcatgggccgtgtcgtcgccgagcgccatgatgttcagcttgcccgccgcaagcagagccgcggcgaggcctgccacgatgtaaacggcgggccaccacaggtcgtccatgagcacgccggccaaaccgcccacgaggaacgccgacgagccgatgtaggcgtcggggttcacgatgaggatggtgttcatgcccgcaccgaacaccgacgtgatggcgatgcccgccagcaccacggtgagcctcgacgtgctggcgcccagcgagatgccgaagatgatgagcgccgtgaccagcgcgcccatgaacgccgcgagcggcggcagccagagcgcgctgggaaacacgctggcggcgatcagcacgaacagcccggcgcccgagttgatgccgatgatgttggggctggccagcgggttgtccagcacggcctggatgatggcgcccgcaacggccagcgcccctcccgccagaagcgccgccagcacgcgcggcaggcgcacgttcacgaggatgctcttcgccgacgcgctcacgtcgccgccggtggcccaggcgagaagatcgcccaggctcaccgacgacgaccccacgaggaaggccgccgccgtcaccgccgcgagaacggcgacggagacgacggtggccagcgacgcggccttttcacggctgaacggagtcaccgatcggccttcgctttacgcgtacagggcgtcgaacagcacctggtagctctggtcccagcgctcgttcggcttgtactggaacagatgcgggtcgagcgtgacgtagcggccgttctgcaccgcgtcgagcgtcgaccaggcggggttcgccgcggtctggtcctcgagcaccttcatagcggccgcgtcgtcgttgcccatgggcaccacgaagatgtagtcggggttcatctcgatgatggactccaggctgaagtccttgagcaggctgggattctcgtctgccaggttcttgacgcccagatcggccagcatggcgcccgtcatcgtggaggacgcctgcacgcgggtgccgcccgagaacgtggtcagcaccagcgccgtgggcgcctcgcccgcaggaaccttggccgtgatggcgtcgatgcgctcggacacggcctgggcgttctgctggtacaggtcgtcgcggcccgtgatgtcgcagcaggtgcgcagcatgcgttcgtagtcctcgaacgtcgtcacctggaagcacgccaccgggatgttcgacgctgcgagcgccgccttgaggtcggcctggttcgagtcgcctccgcggccgcccgagccgctcgtcatgatcacgaagtcgggctccagcgcgatgatggactcgaggttcgggttcgagaagtcgcccaccttctgcacgttttcggacttcagatcgtagtcggacaacgtgaacgcatcatcggatgcgcccacgagcgtgccgcccgcaagctcccatatgctggcgaaactgcccatgcaggcgaccacgcgctgcggattgtcgacggtcacctcggcgcccgtgtcatcggtgaacgtgaccgctccggcctgagaggcggccggggcttctgtttgcggagcgcttgcgtcagcatcggcgttcggctgagcagccgagcagccggcaagcatcatcgtcgcagcaagggacgcggcgacggcagaaggaatgatgcgttcggagatagtggtcatgagtggtcctttcgatgtcgacggtttagacggcggccgcaaccaaagcgttgccgtgggcgcagtagtcgtcttgagcgaggatgtcgccgtcgtggtagtaggcggcgcgggcgcgacagccgccgcagccttgcgcgtagtcgcaggtgccgcacgagccggagtacgcctgcgtgcgcagcttctcgaacacggggctcgacgcccagatttcatcgaagggagtctcgcgcacgtcgcccgcctcctcggtcatgtaggcgcagggacgcacgatgccctcgctgccgatgacgcagtacgtgaggccggccaagcagccccgctcgaagcgcgtgtccacgcccagctgcttcgccacgcgcgtgaactggggagcgcacgtgggcttcacgtcgatgggcacctgcgaggccttcgtcatgatgtccttgagcagctgctcgttctccagcacctcgagcgatgtctcctggatgaacttgccgcgccccacggggatgaggaagaacacgtagtgcgccatagcgccgatctccacggcgaagtcggtgatgtcgcacacctcgtcgcggttccaatccacgacggtggtgtgcagctggaacggcaggcccgcctgcttgcaggcctcgatgcccgccatggtgaggtcgtaggcgtgctcgagcccgcggaacctgtcgtgcttgacggcatcgaggctgtccaccgagatgcccatggcgcaggctccggcctccttcagccgcacggcgacctccggcgtgatgagcgtgccgttcgagccgaacacggggcgcagcccgcgcgaggcagcgtgcgccaccagctcgtagatatcggggcgcatgagaggctcgccgcccgagaagatcatcaccttgaagccggcgcgggcgatctcgtcgatcatcttcttgccctcctcgcaggagagctctttgtcagtggcctcctcggcgtcctggtagcaatggacgcacttgaggttgcacttgttcgtcgtcatccacgacacgagcataggcgtatcctttcttggttgcggcttcgccttttggcggcgccatgcttgctgaaaccgaacgagggtatgacgtgccgtgcgggagccgcaaagggaggtaggagagatgaggttttgcggcacccgcacggcgccgagatcgcagcctattcggccggatcggggcgggaacggtaggaggcgacgatggcttccagatggtcgaacaccgcttgacgcagctcgtcgaacgatccgtcgccgccggcgtgaggggcgatgttctccatgaggatgaagttctgctcagcgcgcgccgtgtcctgctccatatccaactcgaggtagcgcttggccagctcgcggttacgttcgctgtccacgggctcgccggcaggcatgaggcggatggtgtcggcgatcagctcgtgccacttcgacacggattcaccgcgcgccacttggttctcggcggcctcctccgaagccggagcgtcgtcgcggatgcaagtaaggcgccagaagaactggctctcgccttggcagcgttcgatggtgtcggccatggcctcccagttcacagacgcatcgtcgagcgactcgtcatgcagggagcgcagcgtggtcatgcgcttgaacagcgattggaactgctcttcgatagcatccatctgctcgtctgccaactcctgcaatgctgccggctctcggtaaagagctgcatcggatttgatctgggccagcgacagcccgaggtacttcaaggtcagaatgcgatacaggtctttcacgttgtcgtcggtgtacaggcgctggttctgcggacccttcgccgatggcgacagcagcccctgctggtcgtagtactggatggtgcgcaccgtcacgccgacgcgtcgcgccagctcgccgatagtcaggtagttctgatcggtcatggatgctcctccgaggcgaccgaagctcggccgccgcctttcctctcgccttgccgcgcgtcccccgcgcgctcgaactgcaatcgagcatacgcgatgacgtaacgtcaccgtcaacgatctccaaaagatggcgacaaaaatcagggaaaaccctaagcgtttcctgtcggcgaaaaaaaaaacgcgctcccgggcgggagcgcgtttcgtcgtccatgctgcgagcgtgataatacgcgcggtttagtcgatttcctcgaactcaaaggcatcgtcggcatcgccgaacccggacagatccttctcgacgccagaaggagtcggcgtggccggcgccaccacggcgcccgtcgcctggggcacagagtacgcgcccgcgccgtcgcggttgatgggagcctgcgccggagccgtcacacggcccgtagcggtggtctcgaccacgtcgatcgtgcgcgcatgggcgctgaccggcagggaagcgggcatctcgccgccgatctcggccagcttgcgcgtagcgtcgccgatgaagtcggtgagcaggtcccggtagtcctcgcgcacgtcctcgcggtcgtcctcgagcttcttgatggcgtcgagcaccttctgacgctcggcttccgccttgtccacgatgcgcgtgccctcgtcctcggcatctttgatggtggccgctgcctgggcattcgcgttcgcgatgatctcgtctgcggaacgctgcgcgatgatgagagcctgcgcgatggcgttgtcgtcggccttcttggcctcgagctggcgctccaaatcggcgatgcgcgcgtccttctcggccagcgcggcatcgtccgtcacgacgacgggagcttcgacgcgagccggcgtgtcgaagccttcgaacttacgatcgtccagctggttctcgagttgggcgatctgggcgttcatgccgtcgatctcgtcggcgacatgctcgaggaacacatcgacttcgtcgacgtcgtagcctttgcgatcgatcgagaagctctggttgtgtatctcagccgaggtgatagccatctgtagtcccttcgtcttgttcgcacgcgaacacgattctacgcattaaaacaagtttatcagtaaacgtactccaaattgtaatacaagcagggcgatgatgggcgtaacgtccaccatacctccaagcgggggtatcagcttcctgaagaggttgagatacgggtcgcacactttggccagtacccggttgatgtccgccaagatgccacggtcggtgggaaaccacgacatgagcacgtagacgaacagcaccatactgtacgcatcggcaagcgacacgatgaggtatttgatgctcaacatgcgttctactccttagaacgtcgggcggcggcagccgcgccggcgaagaatcgaatacgggatcacagcacgccctgcccgcgcaggctcatgcgctcggcatcggtgagcgcagcaccgcgcgagatgacgaacaccttgtcggccacgcagtccacgctggcgtcgagagcgctcgacacgccgaacgagaagtcgaggatgcgcttcgacagattgtcgggcgtgttgcgcagcgcgagcaccaccacatcccccgccttgagagccttcgcgatgcgctcgacctcggcgtagctggccggcttgagcacggtgaccgagcgggaggggttgtgcttgaccgccccggcgcccgcgtaggcgtcgaacggatcgaacgccgcagtcgtcgccgtggcggttgccacggtagcgcccgaagcggtggttgccgtttgcaccgcgacgcccgaaccagaaggcccagaaacgctcggcgcatcgtcggacgtggaggtgaacagcgagttcaggctctcggagcgctcgcggttcgctgcggcggccgcacgcgcgataggcgtgttcgccggggcgggctgcgccgcttccaccatggtgcgatcgccgcggtaggagccgcttgaaggcgacgtcacacggcgaggcggcaacggatcgcggttgaggctctcgggcacctgggtgtgcgcgcgcacgtcgtcgatggacacgagcttcgcggatcccacggacgagctgcgcgccgaggagcgcgcgtgcgaggcgcgcgcaggacgcgaagtcacgggcgcatagggctcataacgcgaaccgggagcatcgtcggcggggaaatcgtcctcgttgtagtcgggaccgtactcgccgtactcctcgctgtagtcgtcgaacccctcgtcgtagtagccgtcgtcgtaatgcgggttggcgtctgcgaaacccagtttcgatttgattccctcgagcattccgtgctccgatttcttgatctttggcagctccataccgttcacctgcttcgtttcttatccggcggtccagccgccgctgcgttcagcgtcatggccgcgccgcgctctcacgcgtgcgcggggccctcgaaagcgtcgtcgaacagggctcgcccgatgcgcactatggtagcgccctcggctatcgcctcatgccagtcttcgctcatgcccatagaaagctcatcgaatacggcggcctgttccccgtcgagcccaagccgcacttcgtcgcgcaaacgcgccagatcggcgaagcatgcgcgagcccgttgcgcatcgccctgcggcgccatcgtcataagcccgcgcacgcgcacgtgcggaaagcccgcgcagtactccagcatgccggccacctcgctcggcgcgagaccgctcttgctcgcctcccccgacacgttcacctcgagcagcacgtcttgcaccttgcccgacgccgcagctgcggcgtcgaacttcggcacgtgacgctgttggtacagcgagtgcacgagcgcggcatcccgcacgatgtcgggaatgcggcgcgattggatgttgccgatgaagtgccaggtctgctgcggaaagcgagcgcgcttcccctcgagggagtccgggcggttctcgccgaagtcgtgcgcgccggcctcgatggcctcggccacttcgtcggcacccaccgtcttcgacaccgccactacgaccacgctcttcggatcgcgcccgcacgcctcgcaacaggcggccgcctctgcgaccgtgcgctcgtagcgctctttgaatcccatgccgctcacccagcctttcgaaacgccaccgcgccatggcgcccgcagatgccgcccgcggcgcggtacgagaagaattcgtcgcacgagcataccgtgcacacgcccgcatcagccacgcgcgcgcgatcgatgcctgcctcttcgagcccgaccgtcaacgcctccagcaggtcgacatggcgttcgtcgggaatgcaggaggaaccgaagcggtcttcgaagcgcttgcgcacgtcggcgcccgtctcgaagcaggacgcgtggatgtgcggccccacgtacacgttgtagccgctcgccgcatcctcccccagctcggcggcatcggcccgcgcgagcgcgcggacggccttcgcggccacgccgttctccacgccgcgccatccggcgtgcgccaccgcgaatcggcccgtcggcgacacgacgatcacggggacgcagtcggcgaagcacagcagcgccgcgatcccgggaacggtggcgacaagagcgtcggcgcccgcgagcgccgcttcgcgcgcggcatcgagcgcctcgggcgacgcgtcgtcgagctccaccacgacttccccgtgcacctggctgggcaccacgagcggaacgtcggccgcatcgagcgcttccagcacgagcgctcggttgcgctcgaccgacgcagggccgtcgcccacgtgattacccaagttgagcgaggaatacgggccttcgctcaccccgcccgcgcgtccggtgaacgcgacgcgcacgcccgtgcgctcgtacagggcatcgtcggtaagcgcaggaagacaacgcgcgccgaatcggcgcgcggttatctgagggatgggcagttgtccggtcgcgaccatcaagcgaccgctccttaccgctggcgcttcaggaagtcggggatgtagtcctcgtcggcgaaacggccgtcgcgcgacgtcgtggagaacgtcacaggaggagcggacggcatcgggtcgggcgccgtcgtggaggcgaacaggtccttgcgcgagaagtccatggaggactgctgcgaagaacccatcttaaaacccgtggcgatcaccgtgatgcgcacctgatcctgcatgccttcgtcgatgatctggccgtagatgatgttggcgctctcgtcggcgcaagcttccaccgtgcgcgccgccgcgtcgacctcggtgagcgtgaggtcggggccgccggcgatggagaacagcacgcgcgacgcgcccgcgatggaggcttccagcaggttggagttcgtggcctgctgcgccgcgtcgagggcgcggttctcgccggaggcgaggccgatgcccatcatggccgtgccggcgtctttcatgaccgtgcggatgtccgcgaagtcgaggttgatgaggcccgggatggtgatgaggtccgtgacgccctggataccctggcgcagcgtgtcgtcggcgatgcggaacgcgtcgagcatgctcgtcttcttgtccacgatctccagcaggcggtcgttcgggatgacgatgagcgtgtcgactttctgggacaggaggtcgatgccctgatcggcctggttgcggcgggtgcgaccctcgaacgagaacggcttggtgacgatgcccaccgtcagcgcgccgatctcctcgcgggcgatctcggcgatgatgggcgccgcgcccgttccggttccgccgccctcgccggccgtgacgaacaccatgtccgcctcggcgagcgcctcgcggatctccgcgcgactttcctcggccgcctggcagcccacttcggggttcgcgccggcgcccaggccgcgcgtgagctcttcgccgatgtggatcgtcttgtcggcgtccgacatgagcagagcctgtcgatccgtgttcacggcgatgaactcgactcctcgcacgcccgcttcgaccatgcggttcacggcattcgtgccgccgccaccgacgccgacgaccttgatgaccgccaaatgctcggaacctatcttgtttggcattgtatcctccacacctgctgcgttttcaaatgctgcgtttcccgtcagggcacagttcacgtgcggttattgtacacgatgctcaaccatttgcaaattacgctgcggtaatgaaatgcgcacgtccacagatatagcggatgagccgggtaagcggaaacgatggatgccgccgtggcgcgccggcgcggccatcgacgtcgccgctcatggtcgacaggcaaccgctggcgaaggggctcgcccgttcgcaaatccgcgcggcgccgctcgcaaggcggctgctggccgaacatgcaggcgaggctatatcgtataagagcagcatcgcgtcgaccggctgaccgaaaacgaacgtccgcgaccggaagggagtcccccatggttccgctcgtactcaccgccttcaaagtatagaaagctcgcgcgtcgattcggcgcgcgcgaacatccccctcctcaaaccaatacgcttatcgtcgcgtcctcttgcgaggtcgggcgaagcttgtaccgaaaggaagaccccatgccctggttcgatcaagcgccctggctcgtcgccctggcgccgtttttcggtctgttcctttccgcattcgcgaaacgaacagaccccttcatcgcaggcgaccgggtgtaccgccacgacgcccccgcgcgcctgtcccactggacccacggcatcggcaccgccgtgtgcctcgcgtcgggcatcgtgctgggactgaggttcaccccggcattcgtggaggacggcccggccgccatcctatggcagaacgtccatttcgcggccgcgatcgtgttcctgttcggaacgttctactacctgggcaacacgatcatctcgaaatggcgcttgcgcgagcaccttcccacgaagaacgtggtcgcctacacggtgcgccactacggcctgctcgtgggcatcaagaagttcacgatgccgcccgaggacaagtacttcgaaagcgagaaggccgcctacgtgatggccgtggtcacggccgcgttgctggtggtgacaggcctggtcaaggcattggcccacgtggtgctcacgctgcccgacggcctcatgaacgtcatgttctgggtgcacgacatcgcggccgcgctcatgctgctgttcttggcggcgcacgtgtttttcgccgtgatcgcgccgttctcgtggaagaccttcccgtccatgctgatcggatggatgccgcgcggcgaggccgagaaggaacatgcaggttggatggagcggctcgagcgcgagcagtccgagcgcggcatggacgagtccgcactcggcgccggagagcgcgcggccgcgcaagagacgatgggagccgccgcgcgcgcagcagccgccgacggcacgcaagggagatgagcgatatgaccgagacgaatcagcgcgcgaccgacgcgcagcataaaggcggcctctccaggcgccagttcatcgccgggatcggcggattgggaatcggcgccgtgctgggaagcggcatcacggcgctgctgttgcccgacgacgtgtacgccatcgaggcgagccaaggctacctgctggtggatgcgaagaagtgcgccggctgcgagacgtgcgtcatctcgtgctcgctcgcgcatctaggccgtatcaacacctcgctttcgcgcatccaggtgatgaagaacgcgctgggaagcttcccctccgacgacgtcatgcagaaccagtgccgccaatgcccctacccttcctgcgtggaagcctgccccgtgggcgccatgcacgccgaccccgagacgggcgtgcgcctcgtggacgagggcaagtgcatcggctgcgagcgctgcgtggaggcgtgccccttcacgccgtcgcgcgtgcagtggaacttcgaggacaagcacgcccagaagtgcgacctgtgcaagaacacgcccttctgggatgaagagggcggcccgtccggcaagcagctgtgcgtcgagatctgccccatgaaggccatcgcgttcaccaacgtgctgcccgtccaaaccgacgaaggctacacggcgaacctgcgcaacgaccactatctggaaatcggcctgcccagcgacgacgaggcgcgcatccctcccgcgcggctcggatacggcgcaggcggcacggcagcccaggcggcagccggctcgaacgacaaataataggaggacctcatgaccgaacattacggctacgccggcaagatactcatcgtgaacctgaccgaccgcacctcccagaccatcgacaccgaaccttacatcgaatgggtgggcggccacgggatggcctcgaagctgttctgggactactgcgaggacaagaccgtggaggcggtcgatccgggaaacgtgctggtgttcgccgccacgccgttctcgggcgccgtggtgccggccgcctcggcgcgctgcgagttcacgggcatcagcccgttctcgctgcccgaatggtacaaccgctccagcatgggcggccgtttggccggcatgatgaaggaagcgggctacgacgcctgcgtggtgcgcgggaaagcggaagcgcccgtgtggatcagcgtggtgaacgaccaagtgacgttcaacgacgcgaccgacctttggggactcgacaccttcgagtgccaggagagaatctgggaagaggtgacgcacggcaccgcccctggctcgtggtacgagttgacgaagggacgcgacggaggccgaaccacgcagcgaccgtccgtcatctgcatcggacctgccggcgagaacctggcgcgcgtgtcgtgcatcgtgcacgatgccggccacgtgacgggacagagcggcttcggcgcggtgttcggcgccaagaacctcaaggcgatgagcttcatcggctcgaagagcatacccatcgccgaccccgccgcgctcgtgaggctgcggttggaagtgcaggagaagttcggctacgacatcgacgccggcaaggttccgggcgcgccgggcagcccgggcgccgcatccaccgtgctggacacgagccccacggtgtcgcgcgcagaaggatgccgcggctgcttcaagaactgccgtaacctgtaccccggcggcgtgggcaacgagctgacctgctcggccggcctgtacttcaccgactcgggcaagatcgacgagcagctggccgcctacagcctgctgtcgaagctggggctgaacggctacgagatcgacatgcccgtgtacctgcacaacctctacaagatgggcgtcatgggcaagggcaaggacatcgacaccgatctgcccttcgagcagtacggcacctacgcgttcatcgaggagctgctgatgcgcatcgcctaccgccgcgagatcggcgacgacctggccgagggcatcgcgcgcgcggcgcagaagtgggggcgttgggacgaggacacgtcgtcgggcctgctggcgcgcccgaactggggctactgcgagcacaacgagccgcgcgccgaggtggaatggagctacggaagcatcttcagcgagcgagacatcaacgagcacggcgtacacaacgcggtgtacaacacctccatcatggcggtgctcaccggcgccgagccgcccgtctcggccgagaacatggccaagcagctggccgatcagtccgggctgggcgacccgctgtgcttcgactggagcgaggagggcatctattccgatgcgcgcgtgcgcgagatccactggaaccgcgcctacgggcgcttctggctgcagtcgctgggcatgtgcgactgggtgtggccgaacttcatcagccgcaagcacaccgccgagacgggctcgacgtacggggccacgcccgagtacgaggtgaagttcttccaggccgtcaccgggcgcgacctctcctacgaggaaagcatcgagctggggcacaagttctgggtgctcgaccgcgccatctgggcgctggagggacgccatcgcgaccaggaggtgttcacgaactacgtgtacgacgtgaagaccaccaagcccttccccctcgtggtgttcgaggacgggaagtggagctactcgctgtgccagggccgcacgctcgaccgcgacaagttcgaggacttcaagacgcgcttctacgcccacgaagggttcgaggagtccacgggtcgcccgacgcgctccgggctcgaggcgcttgacctcggcttcgccgccgacaagctggaagcggccggaaagctgggagcgtgatggacatggcagctctcgacgagacggccgccgccacatcccgggaggccgctgcgtgcggcggccccgcctcccctgcatggggcgaggaggcggggagcggatccgaaggcatacccggcatggccgaggcgtgccggcgcttccccttgccctcacccgacgaggcggcccatgcgctgcgcgagctctcctggggcgagcacttcgttgccgggcgcatggtgccctccaagggcgggtcggacctgtacctgtacaacctgcacagcgcagccgtgttcctgctcgaccgagacgaagcgcgcgtgggcaagggcgccgaccagatcatcaagctcatcgacgtagacgccttcgtcgcctggctgcgcgacacggtgggcgacgcggcgctggcggacgcgatcgcgcgggaatgtccggccgacgacccctaccgcgaccgcctggagaacgtgcagcggctgctcgcgctgcgcatggtccagtacggtgccgcgagcgacgcgatgaacgcggccgacgccgagcaggacgagggagcttgacgatggcggacggacgggcgtgcgcgccgctggaggacttccccctcctcgccgcgcacgccgcgggcggccctccgctcgcctacctcgacaacgcggcaaccacgcagaagccgtcgtgcgtcctcgacgccatggatgatttctaccgcacggcatgcggaaacccgcaccgttccgcgcacgcgctggccgctgcggccacccgggtctacgaggacgcgcgctcgacggtcgcgcgcttcatcggcgcgtcgccggaggagacggcgttcacgagcggggccacgcacgccctgaacaccgtggcgctctgttattgcgccgagcggctggagccgggcgacgagatcgcgctcacgctgctggagcatcacagcaacctcgtgccgtggcagaccgcggcgcggctttccggggcgaggctctccttcatcgtgcccgaccgcgccggggtcgtctcagacgacgagatcgaccgggcaatcggcccgcgcacccgcgtggtggcgttcaccggcatgtcgaacgtgctgggaaccgtgccgcccgtcaagcgcatcatcgaagcggcgcacgcctgcggcgccgtcgccgtgctcgactgcgcgcagagcatcgcgcacgagcccctcgacgtgcacgacctcgacgtcgacttcgccgcgttctcgggccacaagctgtacggccctatgggcatcggcgtgctgtacggcaagcggcgcctcctcgaggaaacgccgcccttgctgcgaggcgggggcatggtggaggcggtgttcgagggcgcgtcctcgttcgacggaacgccggggcgcttcgaagcgggcacgcagaacgtggcaggagccgcggggctggcggaagccgtgcgctatctcgaccgcatcggcttcgacgccgtgcgcgcgcacgagcgcgagctgacccgcgccctggtgagcggcctggactccatcccctccgtcaggctctacggccccgggccgaacgccgagacgccgcgcggcggcatcgtctcgttcaacgtgaagggcgtgggcgcagccgaggtcgcccacgtgctggaccgccgcggagtggcagtgcgcgccggcgcgcactgcgcccaacccctcctgcgccacataggagcggaagccgtctgccgcgccagcgtggccgcctacaccaccatgcacgacatcgaccgtttcctagaagccgtagagtcgtcccgcaacgaagccgtagccctggcaacatcgcgcatgctgtgaaacagacggttcgggggttcccgcctgccggaaacccccgaaccgccgcacgggatccttcgactcgctacgctcgctcaggatgacaacgagcacaaacccccaggtcgaaccctcccagcgaacaggaagctcaagccgctgcgccttgcgggcgggcggggcgccccaccaagcgagtttcgcagcgaagcgaggactgtctgagcgactggggcgtcccgcccgcccgcaaggcgcagcggcgcgcaggtccctagagagccctccaggtgggccgatccaccacccgcacgttgatgtacgccagcccgtcgggatgctccttcatgatctcgaggcagacgcgctctttgtcgcggatgttctcggccgtgccgaacacgatctccacgccgctttccagcgtcagcgtggtggactcggtctcggtggccgccaccttcttcacctgccccgccagctcggtggtcatgccgtccacgatggccagcgcgttgttcacgttggcgtccgagcagtaggcgcccacctcggggcgcgtgccgtagggcacgtcggtgatgtgcagcaccttggccgcgtcctcgtacaccttcgggctggtcctcttgccggcctcggaattctggtcggggatgggcatgagccacatgccgtccgaggcgatggcccacggctgcaccgactcggcgttctcagtgggcacgtccaccaccgccgtgatggtgcgctcggtgacggccagctccagggtgttcgggaacacgcggttcaccgacacgtcgtccacccatgcgtctttgagcaggcgctcgcggatgccagcggcgtcgacgcgcagaagcgtggttccggcgggcacgctggcaagctcggacatgtcggtggccgtgagatgctccacgccggtgaccgagacgttctcgatggtgaacaggttggagtagtacacggccaggccgccgcctacgagcgccagcacgagcgcggccacgatgccgatgcgcaccaggtagcgacggtaggttttctgcgcgcgagaagagcgctcggcgcggtcgagatcccccacgcgcaccgacgacaacggcgggcgaacctggttcgcacgacgctgcggcagctggccgccgggaatggcgcgataggttccaggcgtcgaagcacgcgacgaagttcgcggcatgccgccgcgcgcggattggcgcggcgcgccgccggcgggacgcacgcccctgccggcctgcccggaagcgcggctgttgcgcgggctcgccttacgcgaacccgaggaaacggacttccggttgtaattcgatgccatacgtctcgtacaccttcgtcttgaccaggttgatcagttccagcacgtcgcgcgccgtggcgtcgcccgtgttcacgatgaagttcgcgtgcacctccgacacctgcgccccgccgatgcgcaggcccttgagcccggcttcctcgatgagcgcgcccaccggagcgccttcggggttgcggaacacgcttccgcacgacggcaacgacagcggctgcgtcttcttgcgccgcgcgtgcgacgcttccatcttaccgcggatgaagaacgggtcggcaggctctacggaaagttcgcattccacgatcacctcgtctgaagcgaacgagctggaacggtagccccacgcgatctggtcgccgtcgcgccgaaccagccccttcccgggcgacagcgtggtcaccgacaccacgcgcgagccgatccactcgtcgcgcgagcccgcgttcatgcgcagcgcgccgcccacggtgcccggcgttcccacggcgaactcgaatcccgccagcgatcgacggaacgcctcctgcaccaccgacgacagcggcacgcccgcgcccacgcagaagctgtgcgcgtcctcgtcgtagcggcagatgcggaagtcgcggccgagcgtgatcaccacgccgggatacccctcgtcggcgacgagcaggttgctgccccggccgatggccacccacggcacccggctctcctcgcataccgtgaccaggcgcttgagcgctccgacggaggccacctgcacgtagaaacgcgcgggtccgccgatgcggtacatggtatgccgagccatgggctccgaagggtacacgtcgccgtcgaacgcgtcgtcgacgagcagcgcctcgagcggcgaggtatggcgggcggtcatcgccgcatcacgcctgccgtcgcgcggcggcgccgtccgcctgcgaaagcgcgtcgacgagctgcgggccgatggcggtcacgtctcccgcgcccatggtgatcaacaggtcgccctcgcccagcttgccggcgagatagggcaccacctcgatacggcgcggcacgtaggcggcctcgggatgacccgcatggtcgagcaccacgttcaggaacgtcttgcccgacacgccggggacgggcgcttcgcccgccgggtacacgtccatgaacgtgacggcgtcggccgcgtcgaacgcccggccgaaatcgtccttcagcacctcggtgaacagcggcgcgcgcgagtagcggtgcggctggaacagcacgtgcacatgcgcgaagcccagatgggacgcggcctcgatggtggcggcgatctcggtgggatgatgcgcgtagtcgtcgaccacggtgaccccgcccgcttcgcccacgaggtcgaagcggcgcttcacgccggcgaagtcggccagcgcttcggccgcttgcgcagggtcgtatccgagcgcccacagaaggccgacgacgccggcggcgttcaacacgttgtgacggcccggattctgcttgacgtgcgcgctcacgacgcttccgtcgggcagttcgagcgtgaagtcgctgcccacgccgttcggctcgtacgaggcgatgcgcacgtcgcacgcatcagagaagccgtaggtgaacaggcgctttccggaggcgcaagccacgcgcacgagcgcctcgtcctcgccgcaggccaccaccacgccgccgtcgtcgggcaccgacccgatgaacgaggcgaacttctcgtagatctcgtcgaggtcgcggtagtggtcgaggtggtcggcctcgatgttcgtcaccagcacggcgcgcggcgacagatgcatgaacgacttgtcgctctcgtctgcctccaccacgtaatgggcgcccgttcccgagtgcgcgttcgtgccgtaggcgcgcacgatgccgcctatgaggaacgtcggatcctcccccatgccgtccagcacgctggccagcatggacgacgtggtggttttgccgtgcgtgccggccaccgcgagcgtctggagcgcgcgtcccagataggcgagcatctgggcgcgatgccagatggtcaggccgcgcgccttggcggcggcgagttcggggttgttgtcgaggatggcggtggacacgacgatcacggggtttccctcggggatgttcgccggatcgtggccgatgtgcacctcgatgcccgcctcgcgcagctgcttggtgtagcggctctccttgaggtcggtgccgctcacgcgcatgccctggtcgaacgcgacgcgagcgatgccgctcatgccgacgcctccaacgccgatgaaatgtacctggtcgatgtgcatggtgtccatagtgcgtcctcggtctctctgatgtactgcaaaccgctattgtaccctatcgcgcgaccgctcaacgctgtgcgcgagccgcttccatgaccgcgtcggccagcaggcccgcggcgtcgcgcgtcttctgcgcgcgggccgcggcggtcatgcgggcgcgcacgtcctcgtcctcgatgagctcgcgcagcttgcgggcgaactcgggcccctccacgtcggcgtcggccacgaggtaggcggcgcccgcctccacgcatgcctgcgcgttcatggtctgatggtcctccgtggcgaacgggaacggcacgagcagtgccggaagcgcgcgggccgatatctcggcgagcgacgtggcgccggcgcgcgagacgacgatgtcggccgcggccatggcgtcgcccatatggtcggtatagcccagcagctgccaacgagcctgctgctcgggcgaaagcgccagctgctcgcgcacggcgtcgagctccttggggccggtcacctgcacgatatgcaggtcgccgtaggccagaagctcgtctttgagcgcggcgacggcctggttgaggtgccgcgcgcccaggctgccgcccgtcaccagcagcatgcgcgcgccctccggcacgccgaagcgcgcgcggccctgctcgcgcgtggccgagaacacgctttcgcgcacggggttgccggtcacccggacgcggctcttgtcggccagcgcctcggccgcgtgctcgtaggtgaggcacacggcggcggcgcgcttggcgaggtacttgttggccatgcccatgaccgagttctgctcgtgcaccaccacggggatgccgcgctgctcggcggcgcgcgccacggggatgcacacgtagccgccgaagcccaccaccgcgtcgggtcgtatctcgtcgaaccaccggcgcgcaagcgtcgtgctcttctgaatggtgagcacggccttcggcagcgtgagcggatggttgcggttgaaaccctgggcctcgaacggcgtgaacgggatgcccgcctcccgcacgagccgcgcctccacgcccgtgggcgtgccggcgaagcgcacctcgcagccgcgctgcttcagcacgtccgccaaggcgagcgccgggttgatgtggccggcggttccgccgccggaaagaacgatcagcatgttcgctacctcctgcccctgctcgacgacgagcgcccgccgcgtgagggcggcggcgcaccgttcgtcgcgcgcacgacgcgcagatcggcgcgtcggcgatcgtagatggtcggcgcctcggcgccgcgcgataccgataggatgatgcccaccatgatgagcatggccaccagcgacgatccgcccgacgatatgaacggcaagggcttgcccaccacagggaaccacccgatgaccatggcgatgttgaggaacgcctggaacgcgatcatgatggtgcagccgcccgccaccatggtgccgaagttatcgggcgacgactgcgcgatgcgggtacccgcgtacaggaacagcaggaacagcgcgatgaccaccgcggcgcccaccaaacccagctcctcgccgatgatggcgaagatgaagtcggtgtccgcttgggtgaggtacaggtacttctcgtgcgagtttcccagccccaccccgaacaggccgccgccggacagcgcgtacagcgagtggatgagctggaagcccgtgccgaagccgccttcgccgtcgttccacggattcatgaacaccatgagccggtcgcggcggtatgacgagccgaagatgcccacgaggccgagggcgaccacgacgccgatcacgatgagcatcgtgcgcagcggcacctcgcccagccacatgaccgcgaggatgcccacgacgcagatcatggccgtgcccaggtcggactgggggcccaggatgatgagcaccggagccaggacgagcaggcccacgagcgcgaagaacaccaacacggtgtactgcccctcgcggaagtccgtgaacagacgcgccgccaccagcacgagcgcgatcttcgcgaactccgaagcctgcaggctggccgaaccgatcatgagccatcggcgggcgccccattcctcatcgcccacgcccgccactgccgtgatcacgagcagcgcgaacgccacggcccagataacccataccgcattgctgcgccagagcgagacgggcacgaacttccagatgatcaaagcaaggatcacgcccgcgacggcgaacttgatctggttgagcgtctcggccatcggatcgaccgcgacctcggtgccggctttcgccaaagtgatgaccgccgaggtcgagtagatcatcacgaagccgatgagcatgagggcgagcaccgacagcaagaggatgatccgaggtcccatgatatgcgcaggcgcgccgcgcttgtcacgttgaatagccatggcgggcctaggcgcccaacgcggaagccgcgtcggctacgagcgttttgaatgcggctccccgctcctcgaacgagccgaactcgtcgaaggaggcgcaagccggggacagcagcacgacatctcccgccgaagctagcgcgagagccgcgtcgaacgcgtcggcgaggtgcgcagcacgcgccgcggcgaaaccggcaggagcctgcgcgtccgccgcctcgaacgcggccgctaatcgctcgcccgcatcgccgaagcacacgaccgcgcccgcatgggcgtgggcggcctccacgagcggcgcaaggtcggtgcccttgtcgtcgcctcccagcagcacgacggggcgcgtctcgggaaatgcggcgagggccttgagcgtggcatcgacgttcgtcgccttggagtcgttgtagcagcgcacgccggccaccgagccgcacggctcgatgcggtgctcgagcggcgcgaacgtgcgcaacccctcggccacgtcgctctcgtgcacgcccagcgcgagcgcggctgccgccacggccagcgcgttcgaggcgttgtgctcgcctttgatctgcagttcttcgacgcgcgccgcagcgtgctccgcaccgttcagcgccacgcgcagcgtgccgtcggcgtccaggaacgcggcgttgtcgctgccgcacgcggcgcgcatgtcaccggttagccccgcggccgtgcccagcggcacgtacgagaagccccgctcgcccgcgtccagcgcgcgcaggcggcgcacctcggcgcgcaccacgtcgttcgtcgcgtcgagcaccgccacggcgcccggcacgccgggcaggttcgccagcagcttgagcttcgcgtcgcggtacgcctcgaagctgcggtgccaatgcaggtggtcgggcgtgatgttcagcagcacggccacgttcggcgcgaagcgcgccgtggaagccagctgatacgacgacacctcggccacgtacacgtccgtgcgccccgcggccacggcctcgatgcacggatcgccgatgttgcccacggcggccgcggcaaggcccgcccccgccagcacgtgcgcggccagcgcgcaggccgtggttttgccgttcgtgcccgtcaccgccacccagcggctgtccgcggcgctctcgcgccaggcgaactccacctcgctgatcacctcggccgatacggccgcggctgcctcgtagaaggccgagaactgcgagatgccggggctcgcgatgcacaggtcgaacgacccgcccgcctcggccgccagcacgcccaccgcctcgtcctcgaacgcgacgagcgcgccggccgcgcgtgcctcggccgcgaattcctcggaggccgcgctgcgcgccccggccgccacggccagcgcttccacgcgaccgtccagaagcggcagcaggtacgcgaccgccgcgcggccgctcttgcccagacccaaaacgagcacgcgccccaaatggtgcggcgcgtgcttgcgattcgctatgagctcccgcgaagccatggactacgccaccgccatgagggtctcggcgaagtacagcgagaagcccgtcgcggccagcacgccggagatgatccagaagcgcacgaccaccttcgtctcgctccagcccttcttctcgaagtggtggtgcaacggcgccatgaggaagatgcgcttcttcgtcttcttgtagtagaacacctggatcatgacggacagggcctcggccacgaacaggcctccgatgatgagcgacacgaactcggtcttcgtgagcacggccaggcagcccagcgccatgcccagcgcgagcgatccggtgtcgcccatgaagatgtcggccggaaacgagttgaaccagaggaacccgatgcacgcgcccgcgagcgcggcggcgaagatggcgggttccaacagatcggaacggtacgcgatggccgccatcacgatcatcacgatcatgaccgtgcccgccgccaaaccatccaggccgtcggtgaggttcacggcgttgcacatgcccaccagcaggatgttcatgaacagcaggtacagccaggggatggcgatgccgtcgccgacgggaaccaccgtggtcaggatgccgaaatcgagcgtcacgacgaagggaatctccacggtgggctgtatgcccagccagttcacggccacgagcacgaacgccgtggcaatggccacctgccccacgatcttcgccttcggggtgagaccgagcgagcgctccttcaccactttcgacgcgtcgtcgacgagacccagcagacccgtgagcacggtagccgccagcagcacgaacgtctcgggcgtgggcatgccgacgaacagcgccaccgcgatgaccgcgatcagcatgatgacgccgcccatggtgggcgtgccctgcttcacgaggtggctctcggggccgtcggcgcgcacctgctggccgatatggctcgacttgaggaacttgatccacagcggcgtgagcaccatggtcaccaccatggcgaacacgacggcaaggaacacgagaaacgtcggatattggttgaataccgtaaacatagctaattgaccagtccttcgactacgcgagtcagacccatgaaatgagacgccttcaccagcacggcgtctccgggctcgacgcaggcgtccaaatctccgaacacttcagaaagagagcccgcgcgcacgatgcgctggggatccatgccggcgcgctcagcggcgtcggctatgtgcagggacagctcgcccacgcacacgagccggtcgagcggcagcgtggcggcgaactccccgatgcccgcatggcaggccggggcgtaacttcccagctcgcccatgtcgccgagcacagccacgtgcttgcccggcacgtccagcgcgcagaacgtcgcaagcgaggcgcgcatggagtcggggttggcgttgtaggcgtcgttcaccacggtgaacccgccgcgcgcacggagcacttcctggcgaccggcttccggctcggcatgcgcgagggcatcggcgcagacggccagcgggatgccgcaggcgcggccgaccgcggtcgcggcgcatgcgttcgacacgttgtgcaggccgcgcagcgtgagcgcacagcgcgccgtctcctcctcaggggcgtccgcgaagccgacggcgtgcagccgaaagcgcgggcgaccctgctcgtcgagctccacctgctcggcccacacggcgggacgcgccgcttcggcggcttcggcctgggcgcggcgctcggctgcggcggcggagccgtcgaacagcacggtttccacgcggcgcgcatcgaggcgcgcatgctcgcgcacgaaatcggcgtagtcgtcgtcggcgttcacgaacgcccggcccgtgccctccggcagcgcgcacagaagctcggccttggcgcgcgcgatgttctcgcggctgcccagaagctcgatatggctctcgcccacgttcaccacgaggccccaatcggggcgcacgtagtcgcataggtcggccagctggcccgcaccgcgcatgcccatctccaccaccaccgcctgcgtgccctgctcggcggcgagcagcgttttgggaacgcccagctcgttgttctggttgccggccgtcgccaccgtggacagcgtgcttgccagcacgtcgcgcacaaggttcttcgtggtggtcttgccggtggaacccgtcagcgcgatcacgcgaccgtgcaggtgagagcgccattcgcgcgcgatgtccgccacggcgtgggccgtgtcgggcacctcgataacgcttgcgcccagctcggcggccagcatgcgcacggcctcgtccagcggctgcatcacaagcgcgcacacggcgccgcccgagagggccgcaccgacgaagtcgtggccgtccacgcgctcgcccggcagcgcgacgtacacgtcgcccggcttcgcgtcgcgcgagtcccaggtgagccccgtggccagcgcgcgcggatcgagcggctccaccatgaacgagcctcccgtgcatgcggcgatctgcttgtggttcaaacgcatgctatcgatcctcgcctgcgggttcgtcgccgaacgcacgcgcgagctcctcggcggccacgatgcgatcgtcgaacgagagcacttggtcgcccacgagctgatagtcctcgtggcccttgcccgcgatgaggatcgagtcgcccggcttcgcctgcgcgatggcgcgcgcgatggcggcgcgacggtcggcctccacttcgaagcggccggctcccgagctcattccgctcacgatgtcctcgatgatggcctgcggatcttcggtgcgcgggttgtccgacgtcaccaccgcatggtcggccgccagggcggccttgcccatgatgggacgcttgctggcatcgcggtcgccgccgcagccgaacacgcagacggtgcggccgggcgtgagcgccatgatggacgcgagcgccttctccagcgcgtcgggcgtgtgggcgtagtccacgaacaccgacacgccgcccgtgttcggcgcgctcacgcgctccaaacgacccgggatctgcggcgcctcctcgagcgcttcgacgatggtctcggccgggaagcccagctgcagcccgatgccgaaggcgcacatgacgttctccacgttgaacttgcccacgagcgggtagtcgaatgtatgcaagctgccgcgcacgtcgagcgtgatggtggtgtgggtaggagcatactgcacgtccacgggatggatctgcgcggaaggatcgaagcccgtcgtgaccacgctgtcttcggcaaccgagcaacgccgcagcagctctttgccccacttgtcgtcgatgcagatcacgcgcttggccggataatctttcgagaacaggcgcgctttcgcctcgaagtaggcctcgaacgtgtgatggtagtccaggtgatcctgcgtcaagttggagaacgccgtaacggcgaatgcggcgtcccacgtgcgatcgaggtcgagcgcatgagagctcacctccatggccacgacgtcgcagcgcgcatcgcgcatgcgggcgaacagctgctgcaggtcgggcgattccggcgtggtgtgggccgatttctcggcctcgtcgccgatgcggatgcccacggttccgatgacgcccgtgcgcttccccgctacccgcgcgatatgctctaccaggtaggtcgtggtggtcttgccgttggtgccggtgatgcccaccagcgcaaggtctttggaaggatggtcgtagaagttcgccgccgcggccgccatggccttgcgcgtatccttcaccacgatctccgtgacgtccgtagcgtcggccaggtacaccttgcgctcgaccacgagcactttcgcgccccgatcgatggcgtcctgggcgaacgagtgcccatccgtcgtcatgcctaccacgcagaagaacgcgtcgccgggttgcacccggtcgctgcggtaggcgataccgttcacctcgtcgtcggcgttgccgaggatggtgcagtcgatacctgcgaacagttcggtacaggtcttgcccatggcttcctcactccggataaatgttgaatcggtcgatggctgttgtcattatatccttaaaaatcggcgtgaccacaccgtcggtgggaacctcgttggcacccacaaaacaaaccaattggctggaagaatcggccaggaaaccggtgaaggccaggttgtacaccccttttcggtagccgccgttcttctcgtcgtagatctccgccgtggacgtcttgcccgccacgttgaagccgtcgatggcggcggccttgcccgtgccctcggtgacgacggtcttcagcatgctggtcagatcgtcgatggctttcttgtccttgatgacggcgtcgcttccgtactcggccgtctcgccgctttggggcttcgacaggaggaagtgcggcgtgcactccacgccgtcgttcacgagcgctccgtagaagcgggtgatctgcaacggcgtgagcgacaggccctgcccgaagctgacgttgtaccccgtgaccttgctccattcgtcgaacgggagcagggcgcccaggtagtcggtgccggcctcaccttcgccgggatagtccacgcccgtcttcgtgtgcaggttgtactcgttgatcttgttgtagaggttccggaaccccgacacgtcgcccaccgtcgcgttctcggtggccagcgagatgccgatgttcgacgactggtccatgatctgctgcagggtgtacgtggcatcgccgcgctcgtgcgcatcggtgataacgtagccgtcggcctcgatggaggacgggcagaacagctcggtgtcgggcgtcatggtgccagcttccaggatggccatggccgacaccgacttgaagatggagcccggctcgaacaggtcggtcacgcatttgagcttcggcgcatccgcttccatattcgtccggtcggccggattgagcagcggcagcgatgccgcggcgtagatctctcccgtgccgccgtccatcacgatggcgctgccgccgttggccgtgatgcccttggcatcggccgtcaagcgctcctcgacggattgctgcagctctatgtcgatggatatgatgatgtcctcgccgtccacggccgccttggagtcgcgcgtgccgccgggaatgggcgtgccgtcggggctgcgctcctcgcgcgtgtagcccgcctcgcctgacagcacatcgtcgtagtacagctcgaggcccgatacccccttgtagtactcgcggttgttctcggcatcggtttccagcgtgcatacgccgatgacctggcctcccacctgagcgttcggatactcgcgcttccacagcgtcttatagcggatgccgaagtccatgccttcgcgcgacccacccgaagccgagagctcgcgcacgcgctccttgagagcgtcccccaccgccacgtcagccttctccttcaccaccgcgtaccgcgtgttcggagcggtgatggcttccaggtaatcggacttctggccgcccagcacgtcgacgagcacctgagccgtcgcgtccgcgtcgtcgacttccaccgggtcgatgtagatggtggtcgactccacggaggtggccagcaccacgccgttgcgatcgtagatggtgccgcggcgcggctcgatccagtcgtagctcatacgcgcgttctcggcttccgaagccatggcaggggcggctatcacctgcaggtacgccaagcgcagcacgaacagcgccgcgatgacggcgaaggcgagaatgggaaggaacacccggttcgaattcgagttgaagtcgaccgccgcagccgggcggccggaggcgcgcaccggacgcgccgcgcgcggcggacgggaggggcgtgcggacgagcgggagcttccgcgaccgcgagcagggcgctcgcctcgcggcgtgtgcggtctatcggacatcggttttacgcctcggagccagccgctatggcaacgctcttcgaaagggacagggcaccggactcgtcggttgcgacgacgtccttatccagagtgatgacccccgtggtctcgggggcggccatgtccagcttgcccgcctgctgcttcaccttcgtcggattggacagcgtgctctgggacacttccagcgcggcgcccgaagagcgggcgtcgctgatctggctggtcagctggctcgactgcatcgtcgtggagatcgtcgcggacatgagcccgatgcgcgcgaatcccacaagcgacacgaccagcagcacgaccgccgccgccttcgccaagaacacgacgttggacggaagcgtgggggtctgcgtgcgggcgccgcggcccggaacgacgctgatgcgctcacgcgggctgcgttcgggtgcgcgctcgggatagtacgaatacgctggtgctgcgcccatgttcgaccccctttctgtgtttcgactgcatgtaaaggtcgcgtgcggtgcatatggctcccgcttgcgtcagcgggacgttttttgcttatcgtttctgcgctacgcgaagcttggcgctgcgtgcgcgagcgttgcgctcgatttcttcggcagtcggcagaaccggcttcctggtgacgatgtcgagtatcggctgcttcccgcacatgcacaccggcagatccggagggcacgtgcatcggttcgcgaacttggcgaacgtttccttgacgatgcggtcctcaagcgagtggtagctgatgactaccaggcggccgccggggttgagccagcggatggccgcgtcgaggccgcttctcagcacatcgagctcgccgttcacctcgatgcgcagcgcttggaacgtgcgcttcgccgggtgtccccctgctcggcgagccgaggcggggatggcggccttgatgatgtcgaccagctgctcgctcgtctcgatgggagcgttctggcgcgcgcgcaccgcgaaatccgcgatacggctggcccacttctcgtccgagtaggtacggatgatccgagtgagatctgctgcggtgtaggtgttgatgatctctgctgcggtaagggtttgtttacccggatccatccgcatatcaagagggccgttctccttgaaggagaagcctcgagacggcgtgtcgatctgcaccgaagacactccgaggtcgaacagaaccgcatcgacgccgggcacctccgtgctgaggagcgcttcatccatatttccgaagttgccgcgcacgagttccaggcgcgggcgcacgtcgtcaggcaacgtcccgagtttgagacgggcagcggccagcgccacctcgtcttgatcgatgccgatgagcgtgcccccgctcccgatgagcttggccgcttcgaaggaatgccctgcaccgccgagtgttgcgtccacgaatgtatgctgtggtttgaggttcgagtattcgaggcactcggcgagcagaacgggtgtatgccgatattcgcttgtcatatcgctcacgcctttcgatcagtcgaacaacagaccgagatcggtctcgtcgtccaccgcgtcgtagcgctttgcgtcccagatctcgaagtagcccgtgttgcccacgacgacgacctccttgtcgattcccacggcttcgcgctgctcggccgagatcatgatgcggccggctgcgtcgatggacacatcggctgcacgcgacttcagcttgcggcgcaggcgaacatggagatcgttggtgcggtcgaacttctcgaacttgtcctcgaacacgccggccacccatgcgttgaacgcatcgggctcgaacacgtagaggcactcgtccttcgggttgcgggttaccaccagatccgtcgagagaaccttgcgaaacgatgcgggaagcgacatgcggcctttggcgtccaccttatggcggtacgcgctgttgagatcgacaaccttgttgccctcttccgccatgccttcctttccgccgccgtcccacggctctttcgatgtatggaattctatcccacttcgccccacttcgcaacaaaatatgcgacttgaccccctttttgcccatcctgaaacccaccggactctttcccgttaaccgctcccctgccaaccgaaaaacgacacgaccacatgtagaacggacgcgcttgggcgggcacaacatgtaggccgcccgcccccgcggtgggacgaagtggggagttatgcggaatctgtggcaggatggatcttcaacctgaatttcagttcgccgccccctcccatcaggcataaaacagcgaacggatgtttgaaattgagtcagcagggggcaaagtgggagacgaagagcgcctccctacttcgcgcggggatgggcgctcaggtactcctcgcggatatgggtgcggttcacgtgggtgtagatctgggtggtggagatgtccgaatgccccaggatctcttggatgacgcgcagatcggcgccgccggcgagcatgtgggtggcgaaggaatggcgcagcgtgtgcggatgaaggttcgccacgccgatgaagcggccggcctcggcgacgagggagtgcacgctctggcgcgtcagccgcccgccgcgcgcgttgaggaacacggccgaggtggatttcgcgtacgagcggacgagctcggggcggccgcgctcgaggtagtcgcgcagcgcgcgcagcgcggcgcccgagatgggggcgatgcgctccttattccccttgcccaggatatgaagataaccttcctccaagatggcgtcgcccaaatcgagccccgtgcactcgctcacgcgcagcccgcacccgtacaggacctcaaggatggcctggttgcgcagagccagagggccgctgcccagcgggcgcgacagcatggcgtccacctgcgcaaccgacagcacgtcgggaaggcggtcgggcgctttggggagctggatggtgtcggccgggttgcgacgggcgtagccttcgcgcacgagaaagcggtggaaccccttgagcaccgacacatggcggtccaccgtcgaggctgcgtacgcgcggtcgaacaggtccgactcgtacgccacgatgacctcgcgatcgacgtcgtccaccgaacggatcccgcgcttctcgaggaaccgcgcgtaatccttgaggtcggcagcgtacgcggacacggtcaacggagagctgcctcgctcgacgcgcagatatgccaggtactctcgatacagctcgtccatccgccaccctcgtcgtcgcgccgccgcaaaacgtcgaacggatgtttcacgtgaaacatccgcgccccgtctgccgaaccctctgcatgatatagttcacaggatagcacgccttcgcggcgatgaggacgctgcgcgtccgcaggaagcgcgccaccgtcctccctaggcgcgacgcacggcggcggcgctcacgaaaccgcagaacagcggatggggccgcgtggggcggctcttgaactcgggatggccctggctggcgacgaaccacggatggccgggcagctccaccatctccacgagccgcccgtccggcgacgcgcccgacaccgaaagccccgcttcgaccaagcgctcgcggaaggcgttgttcacctcataacgatgacggtgacgctcatatataatagattcgccgtaagcctcgaacgccttcgtgcccggctccaccttgcacggataagctcccaggcgcatggttccgcccttgccctccacatcctcctgctcgggcatgaggtccaccacgggaaaggccgcctcggcatcgaactcggccgacgtggccccggacatgccggccgcgtcgcgcgcgaacatgcatacggcagcctgcagccccaggcagatgcccaagtagggaatgccctgcttgcgcgcgtagcgagccgcggcgatcttgccctcgaaggcgcgctggccgaaaccgcccggcacgaggatgccgtccatgccgcccagcaccgcccccgcgttcgcgtccgacagctcctcgccgtccacgaggtgcacgttcacgcggcatccgcagcgcacccccgcatgcccgagcgcctcgatcaccgacagatacgcgtcgggcaggctcacgtacttgcccaccacggccacgtccacctcctcatcgcaagcgtccgccgcggccaagaacgagcgcaggggcgccaagtcggccgaacgccgctcgaggcacaaccggtcgagcaccatctcgtcgaagcgctgctcgtgcaagcccagcggcacctcgtagatggacggcgcgtcggtgcaggccagcacctcctcgggccgcacgtcgcagaacagcgcgatcttctcgcgcacgccgtcctcgatctcgtggtccgagcggcacacgatgaagtcgggctgcacgccgatggagcgcagctccttcaccgaatgctgcgtgggcttcgtcttcacctcgtgcgctgcggctatataaggcaccagcgtcacgtgaacgaacagcacgtcgccgtacggcagctccttcttgaactggcgcgcggcctcgatgaacggcagcgactcgatgtcgccgacggtgccgccgatctcggatatgacgatgtcggcgccggtttggtcggcgatgcgccgcaggcgcgccttgatggcctcggtgacgtgcggaatcacctgcacggtgccgcccaggtagtcgccgcgccgctcgcgcgcgatgaggctctggtagatggatccctgcgtgaagttggactcgcgcgtgaggttctcgtcgatgaagcgctcgtagtgccccaggtcgagatcgccttcgtgcccgtcctcggtgacgaacacttcgccgtgctggaacggcgacatggttcccggatccacgttgaggtacggatccatcttctgcatggtcacttggtacccgcgcgccttgagcaagtgccccagcgacgcggccgtaatgcccttgcccagcgacgagacgacgcccccggtaacgaagatgtgcttggccatgattctcctatcatgctatgcgtgcttcatatgattcggagacggcgcctggccgcgcacgaaatacgcccgaagagcacagcggatcctgcctccaaacgtcttttcattctacggcatgcacgaggtcggagccgcattgcccggcgcaattaacaaagccgtaacacccacggcacggcagccgatgcgcgagccagatgcaagaggcgcagacagcgcaagggccgggcgccgcgcatcgagagcgcgtgcccggcccttgcaccggagagggaggggtgcgcacatccggcaaaggacggcaccgtcgaatgatcaggttagttgtctacaaaccggctgcggcgttctcgccggccaccttgccgtagaacatggccatcgcgtggctgtggccgctcagacggaaggggtacttgatagcgaagcggctgccctggatgttgccggacgcatacaagccggggatcacctggcgctcgaggtcgagcacctgggcgttctggttggattccaagccgcccatcatgaccaggcacaggcccacgcccatgcgctgcgcgtagtacgggccgtcgtcggtcacgggcatcaggtacttcgcctgcttggcgtagtcctcgtcgacgcccttctcgcacagctcgttgtagcgctcgaccgtggccagcgctgcatcgacgtccatgccgtcgatgctctcgaacaactcgcgcagcgtctggcccttgaagatggtgccgtcgcccacccgctcgtcccactcggcgagcgtggccgcgaacgtgttcacgcacttcgcagcattctcttcgaagtggctgtcggtgatcatgaagcacttgtgcttgggctgcagctcgatgggatactcggcatcggcggcgcaggtgtcctcgttcatgaaccgctcgccgttgtagttgatgcgcaacagcggtccggtgaagcccatggaatcgttctgcgaatcggtgtcgcccggaccccccatcacgtgcatctgcgagcactggtactgctggatggaagcacccgcccagtaccccagcttgtagccgtcgcccgtattggtgcggttgccctcgacgtccatgttcggccatgggttgccgttgccgttccagatgaggttcggtgcgaagtagcgcaccatgtcctcgttggatcgacagcagcccgatgccaggcacacgccgttttcagcgttgatcttcttgtacttgccggtatcggcgttgcgcgcgtacacgcccaccacgcgaccttcatcgttttggatgagcgcttcggcgaaatggccgaaatacgcttcggagcccgtgccggcatcgaggcccttctggaaattgttgtcgagcacggcctgatggtcggtgaagttcaggcattcggggaaagcggcctgcggctcgctctcccagtcgatggtcggatcgctcatgcagctgacgccgttgggaacgtccgcgctgggatccatcgacatctcgtaattctcgaggatctcgcaatccgcgccctcgatccaccagtccatagcctccgcgtcgcccaagacgaacttgcggacgatattgtaattcgtgatgctggcgcactcctggaactcttccttgatgatggcctcaaggtcgaggtggggcaggccgaaggtgtcggtcagcttgccgttcaagtagcagtactggctggagcgctgctgcggcatggaacccttctcgatgccgacgaccttggcgccgccctcggacgccgcacggaacgccgcgacgcccgagacgcccagacccacgaccgccacgtcgcagtcaagctcttcctccaccatatcgtcggtgatctcaggaggattggcgggccaaggataatagtctccccacggcgacggggcaagtccttcggcggcgtcggccgcgctcgcagccgtcgcagcatcgcccgccgagcttgccgaagacgcctgcggcgaacatcccgccaacgctgctcccgctcccagcgccgccacgcctcctagcgtgaggaacccgcgacgcgtgaggccgtcggccagctctttcttttgcttttcgttgttcatgatctccctccttcagggtgaatcgagcagcgctccatgcgccgcccttgcaacgacgcaaccataggacgcacgtggaacagggagaataaccgcagtgcgtgaagcgcatcaccgcgttgcagtattttttcgttttaccagatgatcggactgaaaagacatcgaggcgaccggctttcggagaacgcgagtccgaaggacgactcggctggagtacaatgggcaggaaacatcggagaagccaaaggggggctttcgcatggcaaacggcacgtacttgaacaggctagccgcccaacctcccatccgtttccgcccccgccttttgctgttagcggctttccttgcctcggcgcccctctatccgcccaactcctaccttatgctgcgtttcgcaccgaacgtctcgcccgctggcgactttcttttcgccatgctgctctcttgctttgcgacagccctcgccatcctgctcttctcggcgcaacgccccagctggcctggcttcgaaacgcgcaaagggcgcccgatcgccacaggctgcgcttggacgtacgccgcagtcttggtggcgatctggattctgctcgcagccggataccgtaacgtcgtcttgttcgcagcgctcggcgtcacggccggggcatgcatggcgccggtgatcatgcggtgggtgcgtctgtatctaatggattttcgcagcgtgatgttctacggtgccatcgcgtgcgccagctcgtcggctgtcgcctggatcgtttcgcttttgtccgacccgttcgcggtagccgcggaaggcgttctcgccataacgggatcggttctccccctgttgttcggaatcgagaaatgcacgcacgagacggatgaggacgcacagagcgtctccggcatcgaaaacggcgggggcggcttcaccggctcccctgacgcggaaagcccgtcgaacacgctgacagggcttgcatcttctctcaggacattcctatcgatcatatgggtgccgctgctgggctttctcgtctgctcgttcatgatggccgcttattcgttcgacgccgacgtgggagcgggacgaagcgagtacacgggcgccatcgttgcatcggccgtcgtcgtggcgctttgcgcaatgcggttgaaaagcccgttcgttatgctgatcgaccgcttggctgttccggcgtgcgtcgcggtgagcatcgtgctgggcagcttcccgacggggacgacgctgttcgtggcgggagcgatgctcgtatacgcgcctctcgccctgctatcgctcttcgcgctctcatcgctggtcgccatggccgaggcgggagaattccctctgcccttcgtgttctcggcggccttcctgctcagctgtgcggcatcgcttttgggcatgacggtgcaggcgaacgtgccgccggatgtgaatttagggccgtacctgtgggtcgtgctttcctcatacttctgcatcgtggtggtgcacctcggcttcgtcgcatggcagcaggcttgctcgacggacgatcccgacgctttgcaggatgcaggcatgcggaacgaaggtgaaaccgatacgctgcatgcattgcagcacgaacgcatcgtgacgctagcgaacgggtacgccctcacgaagcgcgaacgcgagatactgcagtacctgagcctgggatacgggtcggtatacatctccaaaacgctgttcatctccgacaacaccgcgcgcacccacatccgcaatatttaccgcaaactggacgtcagctcgcgagaagagctgctgtcgctggtcaacggcatgaaatgacagcccgcgcctcgcacccctacgcggctctgtacagctgatggtttgacgcgggttcgcccgctatcgtggtatgctgttacattagtgcaagagcagaacggttcgaagaagaagagggattccatgcgcatcgggttcgacaacgacaagtacatcgcgcttcaggccgagcatatccgcaaccgcatcaatcagttcggcggcaagctctatctggaattcggcggaaagctgttcgacgactaccatgccgcgcgcgtgctgcccgggttcgagcccgactccaagatccgcatgctcaagagcctggccgacgaggtggagatcatcatcgccatcaacgccaacgacatcgagaagagcaaggtccgcggagacttgggcatcacctacgacgaggacgtgctgcgcctcatggacatcttccgctccatgggcttcgccaccagcggtgtggtgatcacccactacgcgaaccaaccctcggccggcgcgttccgccgccgcctggaaagcctgggcatcaaaagctacctgcactaccctatcgccggctatccgtacgacatcgaccgcatcgtcagcgaagagggctacggcaagaacgaatacgtggaaacgacgcgccccctcgtggtggtgacggcgcccggccccggctcgggcaagatggccacgtgcctgtcgcagctgtaccacgagcatgagcgcggcatcgcggccggctacgccaagtacgagacgttccccgtgtggaacctgccgctgaagcacccggtgaacatcgcctacgaggcggccacggtggacctcgacgacgcgaacaccatcgatcctttccatctggaagcctacggcatcaccacggtcaactacaaccgcgacgtggagatattccccgtgctgaaggccatgatggagcgtatctcgggcaccagcccgtaccagtcgcccaccgacatgggcgtgaacatggccggcaacgccatcgtggacgacgaggccgtgcgcgacgccgcgaagatggagatcgtgcgccgctacttccaaaccgcggtggaagtgaagcgctcgggcgtgggccaggagcgcatggaacgcctggagctgctgatgaaccaggcaggcgtgaacgcgagcttgtctcccgcgcgctcggcggcgctgctgaaggaggagaccaccggcggcccggctggagcgatggtactgcccgacggctcggtggtgacgggcaagacgtcgtcgctgctgggcgcggcatcgtcgctgctgatgaacgcgctcaagggcctggccggcgtggacgacgacatcgacgtgatcagcgacgaggccatcacgcccatctgccgcctgaaaaccgagcagctgaacagccgcaacccccgcctacactccgatgagacgctcatcgcgctgtccatcagctcggccaccgatccgctggcgaagaagctgatcgaccacgtgaacgacctatacggctgcgacgcgttcttcagcgtgatcctgtcggccaccgacgagaagctgtaccgcaccctcggcatcaacgtctgctgcgagccgaagtacgagcagcataggtactatcacaaatagtaatcacaagtaaggcggtgcaagatgaacggttgttgttgcgtcgaagcgtcaaccctcgtgctcatggccgatggcagccagcgccccattcgcgacctgcgtatcggcgatttggtaagaaccgaaacaggaaccgcgcatatacgcgacatcatcaaagggcgcgagcccgagctggttcgcatcgggctcgcgcaaggcggcaacctcgtcgcgacggggaaccaccccctgttcaccgacaagggcgtcaagcgatgcagcgaggtcgtcgtggacgatcggcttcgcacggagggcggctgcgtcgccatcgaaagcatcgagctcgctccgcacgagcccgcgacgagcaatctgacgctcggaaaagccatcgggtgcgtttcgcacgatttcgaggtatacaacctggttctggatggatcgagcgtattcttcgcgaacgggctgcttgtgggcgacgacaacgagcaagggcgccttatgcgctcatctgacgagattcgcagctcagccagcgttcctgccgagctgctcgccgaagcggagcgcttgcgccgcgattcgatgtagcccgagacgattgcccccgcagcggctcatcttcgcccgaaaaacacgctccaacgtctgaggcgtgtttttcgggcgaagatgctcccgtcgtcgttacgcggcggcgacgatccagatcatcgagccgtaggcgaagctgttgccgtccgcgtcgatcgtggcgttgagcagcgtcttcataccgtagtcggtgaacgttccgtgccacacgagcatcgtgttctcatcgcctgcagctagcagcaccggccggtcgaacgtcgcttcaagtcccagcggtgtgaagcgcgcgtcctgcacgaatgtcgtggagccgctttcggtggtgagcgaccacgagccccccggcaagtcctggtcggcgcgcttgagacgaacgcccacgatggccacgttgcgttccgagcggttcgccgccgcaacggggatgagagcggtgttgtcgccttcggcgttcagaaccatggaaaccgacgaagggacggtgatgttgacctgggcttcctcttggggtgcgagcgcaggttcggattccggctcggcaggcggttcggggacgggcgcctcttcggcgggcgcgttcgcgagcttgtcggtaagctcgtccgccggctgctctacagattcgtccgcggaagcatcgaggtccttcgaatcgtcgggatcctcgacgccctcggagtcttcgggcgtttcagactcgacgggatccttgggctccgcggaatcatccggctcttcaaccgtcggcagctccggcgcatcgggattcacaagctcgcgcccgtcgagattccatgcgtacctcagcacgttctcgtccgcgccgcgatacaccgtggccagcagcgtttcggccggctcctcgaagccgaagcattcatccgcgaccgcctcgtcggcgaatgcgaattcgtcgggaagctcgacgagcttcgggcaatcgtagaacgcgcgcgtcagatcttcgacgctggcgggcacgttcgcgatctcgctcaggttcgagcatccctcgaaccaatgagccaagctcgtcgcttccaccttgtcggcgaagatcacgcgcttgatgtcgtcggccacgcctgccgccagccaggggacatccttgacgtcgtcgaacgcgaccgtttcccccgacccgtcgaccacgaacgtcccgtcgggccacagctcagccaacaccgccgaggcatcgtccgcaccgataggccatgcacgctcgtattcgggaacgatgggagcatcgggggcaaccggctcggcgtcgggcagaggccgggattggggcttcggctcgcttggagcgggagcgtgcgaaggcgcttcgaccacaacgttgtcgatatcgtcaaccggcgtcttcggagccgcaggctcctcgaccgcttcggaaccgcccgcgtccttctcggccgcaaacgaaaacggcaccggccataacaacccgaacaccaacagcgcgcaaagcgcgaaagccgcgctgatcctcagcgcggctttccatgggggcatactatatgctgtcggcttcgtcataaatcgaaaccatttctattgcagtcgggtaagttctacgctagcccaatagtccaagcgacgtcgaatgctgaagccttggtaaaatagctggaaagaaaagtcttatccagagtgcctgattttatatccatcgtcaaagccaaaggcgttgccgtcgtcccatcagtgctttttcctatagtccagttcaaaccagttgcgctcgactcagtaagcactgttttctttgtaacatcattcttttgcgatatggtcacgcacaatgcgttaggagccaatgtcgtgtcggaagaggctaaggtaaaattattatcagttttgttcgtcaccttgacatccgtcaacgcaacatcgaagcccttggtggtattgcctatggaaaaatcgccaggtcccgttatggtgtcgttggtaatcgagatggggagggtcgtaggcactgttgccgaaatatttattgtcgccgtcacatcgaccgagctagtacccgtggccgcagtattatttgagccctgtatcgttttgtcagttaccgcgaacgccggagctgcgcatagccccgttagcattgttgccgcgcaaacaccaacgatgccctttttcaaattcgtaagcttgctcatgatagttccctttctaacgtgcccttacgttgtcggatgcgctctacgtatcttccgcgtcgaaagccccttagccttcgacgttcaaaacaatttcagcggccgcttggccggtttgcttgtgcgtctcgcgatcgtagccggtgaacgtggccacggcggcgtactgtccgggatcaagatccttcgtcagcttgatcgtttgaatatgctggtcgggcgctatggcagccgactcgtacaccgtctcgcccgaatctttcagcgtgatgaccactttctgatccatcgggttcgcggcgatgttctcgatgcgcgcctcgccctcggacgagccgtcggcgaacgtgatggacgccgcgatggagatgttcatcatgcccttcgccacttcctcgttaagcgccgcctggatctcttccttcgacttgccctcgaactggccttgcgcggcgttcgagtcgtaccagtcttccagcgcaggctgctgcgtcagcacgacgccaacccctacggcagcgcccacggcgacaacggccaccagcgcggcgaatacatgcttggacatgccgaggatcttgccggtattcttggcggcgtcggcagctatgttggaaatgggatgcgaagcgtttgaagccccggcatcggaagcgttgtcgacagatgccggatcagaagtcgcgccgaaaccattgccctgcgcgacatcgtcggcagcgttgtcgccgcccgtctggcgttgagtggcatttggttcggcatcatctactggaaggctctgcgtgctcgtcgtgtcttgctcgctcatacgtactgtaccccttattcgacagtccccctgtcgtaaacacgaaaacttagttagctaagatacgccacgggcgatggcaagtcaatggcgtttgaaggaatatttggagccactaaaaaattattcaaacgatgacaattttgcctatacgatcaggcggtatgaattattctgcaatgaggtgccaagggcgaggaagccctaaacaaggccgcttccccctatcgcctgaacaagctcgtcctttcccgttacgcccgttttgcggtacaggttgcggatgtgagtcttcaccgtatcgcccgatacgaacaactctcgcgcgatctcggaacgggtgcagcccttgagcagcagcgccagaacctcctcctcgcgccgcgtcagatcgaacgtccgcgccgcatgcgcgcaccgtgactcgatcgagccctcctccgtgcggtagcgatcgacgagcccccgcaaatcctcaacgcgccgccgctccagctcatcggtctgagcccacgttttccgcagaagcgcgcctaccgctgccgagcatccgcacagaagggctgcgaaggcggcagacacgacgtttccgtacgcttcggtgaacgcgaggcacccgaccaccgcaccggcgaacacgacaacgcagtagaacgcgagaagcaaatccgctcgcgcacgccgatcgaagtaagcgaaacgcgcgatggcatagcacgtggcgcaaaacgtcgcgccgacgcagacaaggatcaccgccgttgctattatgtccgtcataccgatttccttctcgaagccatgcgcgttccgccgtccccaacttggatcctacaatagcatgcgacccagatcaaagcaggggtgaattaaatcaccgttgcagcttcgccttgcgcaatggtaggttcggctcgaatcgaatcgggaaccgacccgatcgccgccgaccggaggaggccgtcatgaagaacacgcgaaccgtccgcatagccgcaggaaccgtctgcttgatcgtcgtagccctcgtgatgggctggttcgtgggacgctacatcccaggggatccccgcgagcccgagccccgcatcggcgacgggctctattctgaaaccggatacgggttatctaagatcgtcgatttcgatccgggatcaacgatgaagctaaggaacatcacgcaaggccaacgttacgtcagacatccggacgaggtggaacgcaccccttccgaattggtagacttctacaaagagaacggcgaatgggagtacgaatgccccgacatcgacctatccgtgtccgaaatcaaaaccatcacgaccaagggcttcgctgaatggtatcccgaatacgcagggacgtaccgcccggtatacgacggcagcgagcttatagcggtcaccgtaaccataaccaacgcctccgacaaccttatacagcaatggtacaagctgccccttgagcatgttacgttgtggagcgaaaacctcgactatatagacgacagcttaggagccggagtggtgcttgacgacgcattcgtgttcgcgaacgaaaactacaatcgtgacgaattgctccgaatcgagccaggagagtcacagacgctgatcctgccgttcaaagtcaacaagaacgccttgaaagaccaaaactcgttcgacgagctcgatccctccgacttctgcatccagatggtcgatttctcaagcagtaccgcctaccgcctttggctgtaagcgcccccctcccgggccgcaacccatcatcgcccgaaaaacacgcctcagcggctggagcgcgtttttcgggcgatgatgggttgcgactgccgcaggggcattgccaacctcttagaagaacaccttggcggcgtgctcgtagaatccgtcatgccggtagcgcagcagcgtggtgggaacggctccgcggctgacgtagacgcgcttcaccggcgcgtcgaacgagagcagctcgccgtctgcgaacagcgcggcctcgcggggatctcggttgagcgacaggtccatctccaccacgtcgttggccgccgtcacgatagcgcgcgaatgcagggtgtgcggcgccagcggcacggccaccaggccgttgaagccgggagccaccagcggcccgcccgccgacagcgcgtaagccgtcgatccggtggccgttgccaccaccagcccgtcgccgcgcatgtcggcgatgtgcgcgcccgagatacccagcgagaagtcgatgatgcgcccgttggcgccgcgcgtcacggccagctcgttgagcgcgaagaacgtgcgcgccggatcgtccacgtcgtgcgccgccgcctcatcgtcgtcgccccacgggtcgggctcgccctcgcacaccacgtcgatgcgcaggttcgtgcgctgctcggccaccacgtcgcccgccagcgccgacgcaaccacggcgatcacgccctcatcgcccgtgttcgccagaaagcccagccgtccgaaattgatgccgagaacgggcacgcccgaggtcccgatctggcgagccgtgcgcaggatggtgccgtcgcctcccagcacaaccgccatctcgacgcccgacgccagcgctccgttcagctcctcatggtcgcagcggcacgacagatcggacgaatcgaccagcgtgtagtccaggccctgcgtggccaaatacgttgcgagcagcagcgatgcgtccacggcttgcgagttggaattattgcgtacgatgaggatgtgcatgagggtcttctttccgggtttgctatgatggggtcattatatccgaagcatgaggaagcgttcgtccatgtccgacaagctcgcacgagctcaacacacgcgcgttgccgaaccggcactcgagcagcccgccgaagcgcctcgacgcccccagcgcacgcacgtgcgcgctgccgaccccggttcgacgtcggagatcagggtgggcggccgccacgccgggctcgaccgcaccgtcatcgcggcggccgtggcccagcaggtcgttcccaagccgcagcctcgcctcgatccgacgagcgcgaaagcgcgtctgcgcgcggccgctcccggagaaacctcggagatccgcatcggcggccgccacgccggcctcgaccgcaccacgccgcctcgagaccccttcgagccctcgacccccgatccgcgcgaagccgcacgccgctcggtgcccagctcacgcgccgagcgggcggcgtttcccggatcgacctcggagcttcccatcatcagcaagcacgcgggcgccgatcgcacgctgacccgcgtcccgcagccagaacacgaaccggaagacaccgccgccgctgtcgggtcgtcggcggcgctcatcagcgtgtgcgtgatgatctcgcgcatcaccggcttcgctcgcacgtggatcatggcgttcgcgctgggatcgacgctgctgtccagctcgtaccaggtggcgaacgggctgccgaacatgctgtacgagatggtggtgggcggcatcctcgtgacggcgtttctgcccgtgtacctgtcggtgaagaagaaactggggcagcaggccggcaaccagtacgcgtcgaacctgctcacgctcgtggtgctgttcctcggcatcatctccgcgctgtgcatcgcgttcccgtcggtggccatctacacgcaaagcttctactccgatcaaaccgagatggcccagtcggtgttcttcttccagttcttcgccattcagatcgtgttctatggagcgtgcgctatcgtgtcgggcctgctcaacgcgaatcgcgactatctgtggtcgtccatcgcgcccgtggcgaacaacgtcatcgtcatcgccacgttcatcctgtacgccgtcgtggcgccgcagaaccaggagatggcgctgtatatcatcgccatcggcaacccgctgggcgtgttcgtgcagctggccatccagctgccggcgctcaagaagaacggcatccgcatacgtccccgcgttgatttccgagaccccgcgctacgcgagacgctggggctgggcatccccgcgctgttcgtcatgctgtgctccaccatcgtggtttcggtgcagacggcggcggcttacgggttctccgacaacggcccctccatcctgctgtacgcgcgccaatggttcacgctcccttacgcgtttctcgcggtgcccatcaccaccgccatgttcaccgaacttgccgacatgcaggccgaaggcgacgccgaaggagtgaagcgcggcatcatcggcggcacgaaccagatcctgttcttcatgatccccttcgcgctgtacctcatggtgttcgcgctgccgctggtcaccctgtaccatgcaggcgcgttcaccatggacaacgtcaactccatcgccacgtacatgaccgtgttggccttcgccctgcccgtgtacggcgtgaacacgtatttgcagaagatcttctccagcttgcggaagatgggcgtgttcgcggcgttcaacttcgtggccggtgcggcgcagatcgcgctcacgatgttcggcgcggccaacgtcgagcgcttccccatcgagatcatcgcggcggccgaggtgctgttctacgtggttgccgacgtgtgcctgttcgcctacctgcgccgccgcctcgggccgttcggcctgcggtcggtggcgaaagcgtgcgcgcgcggccttctgttcggcggcctgggcgccgctgcgggcagcggcgtgctgttcgcgctgcagatgttcgtcgcgccgctgtccggttccatcccgcaggccctcgcctacgtgctggccggtggcatcgtggcgcttgtggtgacgttcggcctgtccatcaagctgcgcgtgcccgaagccgccttcgtcggctccatcgtgggcaaggtgaagggcaagctgggacgcggatagcgcctgcgcgggcgcaagcgagcacaggggaggtgctgcgtggagcttcatcagttgagatacctgtcggccgtggcgcattgcggaagcgcggcgaaggccgccgaggagttgtacgtctccaagcaggccgtctccaaggccatccgctcgttcgagcacgagatggggttcgagctgttcgaccgtgacgacgggatgcgcctcaccgaaaacggccgcgagatcctcgttcacgccgaagcggtgctgcgcgagctggacgagatcgacttgtacgtgcaagcgcagggcgcgggcgcgcggcagacggaatcgctggccatcgcgttcaagtcgttcccgctcgattacctgtttttcaacaagggtcacgaagcggtggcgctcatcgacgagttcgtctaccgcacgcctgggtgctccgtctccacgttcaagatgtccgataccgccatcctgaacgccctggaggaagaagccatcgacctcggcttcgtgcacggaacctacaagcgccccggcatcaggctcgtgccgctcggccccgtggagacgcgcgtgatcacgctgaggtccaaccccttcggcaggcgggcgtccgtccgcatcgccgacctcgaaggggttcccatcagaagccccttcgacttcgatctgttcaccaacgccttcattaccgcctgccacgagcacggcttcgatccgagctttcgcgaagtgccgttgaacgacgaggccatcgacgcgttctgcagcggaggcggggtgcatctgcagcctttcgatccgcgcatggagaaggcctacccgcagtcggtcttcctgccgttccatccgagcgaccggatcgagctgcccctgtgcctcgcctatcgcgagacgcttgcgaagccgctggcgctcaagctggtcggcttcatccgcaacggcatgcggcgctgagcgcggcgcgccggaagccgatccgacgcgccgacgcaaccctactgggcgtccaacagcgacttcgccgcgatccacccggtgatccagctggtgcccacgccgccgaacaccgtcgaattccagaagcaaccgtagttcgcctcgcccgacaggccgcctgccgtggtggcgttggcgtacaaaccctcgatgagcgagccgtcctcgcgcatgacctgcagatgctcgtcggtgcgcaggccgcacatcgtcttcgccatctggctgccgatgatggccccgtagaacggcggcttcaccacgggatgcagccacgaggggtcgtacggcgtggacatctcgtcatccacgcccttctcgcacagctcgttgtactctttcaccgcgcgcaccagcacgtcgcggtcgagcagcagcatatcggccagctcctcgatggtgtcggccttcttcacggcgccgcgctccaccgcctcgtcgacctcggccagccagtctgccgacacgaggcccttcgtgtcgatcagcgtgctcgggtcggtgatgggaatgcggttgcggtcggtgccctcgtcggtgagcacgttcttctcgaacacggtggtcgggaagtcggagtcgcatatggagtacacatggtggcccaccgccgacatccaggccgcgcagttgctcaggtcgcccatctgcccgcccgggttcgcgaacagctcctgcgtggcggcgaagtacggctggcggttgccccgcttgtcgatgatcagccacgggttgtggaacagctggcgctcgccatgccagaagtagtgccagaactggccgtcgccgccggccgtctcctcgtcgatggcgccttcccagcagctccacgaatcgaagccggagaagtcggcgcccatgcccagacccatgcggaaggcttcgcccgtatgcgacggcatgggaccgccttgcacggtgccctcgtaggcgctcggcaggtaggcgcggatcaggtcgcggttcatgccgaagccgcccgcgcacaggatgacgcccttctcggccttgacgtagcgctccttgccgtccggccccttggccacgacgcccaccacgcgaccgccgtcggccacgagcttctcgcacttcgtggacaggcggatgtcggcgcccgccgacagcgcgacggcctccatggcgttcgtggggttgtccatgcccagcaccacgctctgcttgccggcatggacgtcggcatcatgccagatggggcccatgcactccatgttcatgccgtcctgctccatgatccagtcgcacgcggggcccgacatgagcagctggttcataaggaacttctcgtcgatggagtaagagttctgctcctcgtacatgcgggtgaacgccttcacgtcgggcgggaacgtgggaacgctgaactcgagcgcgttctggtccttcgatccgccgaacacgttggcgaacgtgcaggcatggcggctcgcgccgcccacctggccctctttctcgatgccgatgaccttgagcccctgctgggcgaggaacgccgtggccacgataccgccgccgcccacaccgacgatgaccacgtcggcctcgtcgtcccacgacgccggcggctccaccggcaggatgggcgccgcgtcgggcaggttggcgtcgtgcacgcgctccaccaggcgcgcagtgatctcgtcggtcggagcggcggcgtcggcggcagccgcctgcttcgatgaagccggtgctgcggcgcatcccgtcagcgccattccgcccagcgcagcgacgccggcggccaagccgcccttgacgaacgtcctgcgcgagaagccgccgttcgcgttgttcgattccccatgattggttgttgcagacgtatccacgtgatccctccggtcactcgaatgtatgcggtgccaaagccgtgcaaggcccaggcatcgtcgctgatgtccctcgaggcgatgtttcgttcaacacgtgtttcaacgctgcaagcgtatcatggggcggtcgcctcccccgtcatgcatgcattgacggcccggcaacttctcgttgtcgcaagggagcgctgtcgcagctgcgcgagggatggcaaaaaggagtgctgcgctggcgggttggcgggctggcgggtcgggcgcgaaacggctcccatggcagtttcggcagtcgagtcgggcatcgacgatcgcacgcggatcccgccacctgggatcatgcgaccgcacgagacgaaagggcgcgtcaaagcgagtcgaaaccgccttgcgattgccatgggagccgtttcgcgcccgacccgcccccacagctgctgccaggacgatgccccgctgcacgttttcgcaaggcgacgtgcagcaaaaacgaggttttggcacgaggagtcctcgcacccgagacggcaccgcggcaaaaccccagatgacactcgaccgcgccccggaaacacggcgcccgacctcgaaaacacgtcgtcccaagcggtcaagactgccaaaacctcgtttttgctgcacacgaagagcggaaagggcggagcggagtggcccgaaaccgatttcaatccccgcacctttcatgagggtgcgaccgtcggcatggctgtggcacagtgacttcgataccaatttcgatccacgcgccctgcatgagggtgcgacttcaagcttcgggtctgccgccttgagccaatcgaatttcaatccccgcaccctgcatgggggtgtgactccagccaatcgtagaaagaaccgcaataagccatttcaatccccgcaccctgcatgggggtgtgaccgcaacgattatgacatagagaaggaaacgagcacaatatcctgcattccgtgcaagcagccaaccgcactgtctcaacctcgacgatcgaatcgatcccgcatcgggtgcgaacctcccgcatcgatcatgttcgcctttgattcgcactcagtcgaatttgcagcatcctccgccgccgcttttcgcaaagaaggccctgccgtcatcatgactgcaacgaaaagggcgtctcctgaacaaaaatcgccgacgttagatgctttgctcgaccatcgccccagccaaagcctcccccgcaatcaacgtgcagggaaaacgccgacgaacaagcgggcaagaagaagcgcgagcgttcacaacatcgaacgtcgacgctttttgtgcaaattcggccgatgacaagccgcccgatacggcaagcagcgcgcacatggccgccgcggaatcctggtatgatcaggccgatatggctatcctcactcaagaatatagcagtccggaagtcgtccgacctgcggtttcacaatcgcaccggcggacatggccgaccgaaggcgcgcaaaggctcgcatatggacgtgatcttgccaaaatttcgaacgcaccccgctcaggacaccgatcttcctcgcgcgcgccggacggccctcccccgaaacgcaacgcgcccggctggtcggccgggcgcgctcgtgcatcccaacgtattcgctttacgccacctgcgtcttcggcttcagctgctcgctcgtcttgccgaagaacacctcgtaccagcacaggaagcaatagatgttccagatgcgcatcatcttgagcttgccgcgaccctcgaccgtgctgaagtcggccgacttgtggtcgtccagcatctgcacaagatagtccacgttgaagaactcgtgcgcggcctcgcccgtgaacgcttgcttgatgcggtcgtagtacaggtcggtctgcagccacacggtcaaaggcgtgatgaacggctgcttcggcatgttcgccactttcttctggaacccgagcttgctggcggccacgcgcagggcgtacttcgcgtggtcgtcgtccacgcggcacgcggtgggcagctgcagcgccacgtcgagcaccttcttgtccaagaacggcacgcgcagctcaagcgactgcgacatggacatcttgtcggccttcaggcagatgtcgaacggcatgtagctgaccatgtccacgtactgcgtctgcgtgatgatgtcgaggttctgcttcgcggcctcgtcgaagtgcggcttgcaccactcccacggcttgcaggggccgtcgtagtctttcagcacgttggggatctcgtcccacatgtagttcatgctcgcgcgctggtagctcttctccggcccacccgagccgcgcatggcgaagcggcgcccgtggaaggacggcagcttctcggccaccgcgcccgcggcggcgcgcaaagggcgcggcaccttgaagtacttgtcgaactcgaactggtcgtggtagatccagtagccgccgaacagctcgtcggcgccctcgcccgactgcaccaccttcacctgctcgcgcgccagcttgctgacgaagaacagcgggatggcgctgggcgcgcccagcggctcgtccatgtggtactgctcggtgggcacgatgtcgaggaactcctcggcgctcaccttcgtctggaagttcggcagcttcgcccactcggcgaaggcggtggcgtcgtccagctcgttcagcttgatgtcgaagtcgggcagcgcgttgatctcggccagcttgtcctcgcagccgatatcgtagcctaccgagaacgtcttgatgtcgggcgcgtgctggcccatgcagtacgcggccagcgagctgtcgatgccgcccgacaggaagctgccgatctccacgtcggcgatctcatgcaccgccaccgactcgtcgaacacgcggttgatctcgtcggcccactcgtccaggcccttcgactcgtcgattttgtacgtgatatggtagtagcactcgacgttcagcttgccgccctcgaacaccatgaagtggccgggcaacagtttgtgcacgtccttgaacatggtctgcgagtcgttcatgtactcgaagcacaggtactgcggcagcatctcgcggttgagttccttcttgaacgccgggtgcgccagaaacgccttgatctcgctgccgtagatcaggcggttgccgtcgtgctggtagtagaacggcttgatgccgaacaggtcgcgcgcgcacacgaggcgcttcttcgttgcgtcccagatggcgatggcgaacatgccgcgcagcttatcgaacacgtcggtgccccacgcctcgtagccgtggacgatggtctcggtgtcgccgttcgtgacgaactcgtagcccagcgcctcaagctcggcgcgcagctcctggaagttgtagatctcgccgttgaacgtgacggtcaccgtgccgtcggcgttctgcatgggctgtcgcgagccctcgaggtcgatgatgctcaagcggcggaagcccatggcgatgtcgtcgtccacgaagaaaccctcgtcgtcgggcccgcgatgggcgatgcgatcggccatgtccttgacgacggccttgttggtatcggtatcgtaatcgaccgcggtgaatcccacgaatccgcacatatgatcggctcctcctgcgtgcgcgcctgcgcttctcgcgcggcgggtgcgttcatatccttcggtatgatacgccaccgtcgcgcaatccccaagggcggcgatggaaaccccatatccagacgcagcccccagcccgcagccaacggatcgccgccccgcgtttctcggctcttcacggagattcgcttcccgcgccacgccgaaagcgagctatgggataatgctgcggtataccgtacataaggagaacccgatatgcccgcttcaccccgcatcgcatctaccgccgacgtcgcgcgccgcttgcagcccgtcgtcgtgggcggcgacatcctggcctacagctacgtgcgcgagctgcaccgcgcctacggcgtcgagcgcaccatcgtgctggccacgcaggacatcaagatgctgtcgtcgagccgcttcaccgactaccgcctggagccgctcatccacgagccggaaggcctctacgacgcgctcgagcgcgtggccgcccaagtgcgcgccgaggaccccgaccgtgtgctgctggtgctgggctgcgacgactgccacgcgcgcatgctgtcgtcgggaaagccgcgcttggaagcggccggctacacggttccctacatcgacttcgacctgctggacgacatcacgcagaagcgccgcttctacgagctgtgcgacgaactggacatcccctacccccgcacctggtacttcgattgcagcgagaacggcccggccgagctgccggtgcaggacttcccctacccgctgatcgcgaagccgtcgaactcggctcagttccaagatgccgacataccccgcaagcgcaagatctacgagatcgaaagcgctgaggagctggctcaggtttggcgcgacatccgcacctccgattacgacaacgagctggtgctgcaggacttcatccccggcggcgacgacgccatccgcacgctcaccacgttctcggacgcctcgggcgaggtgcgcgtggtgtcgggcggcgtcgtatgcctgcaggaccacgaccccacagcactcggcaacccgctgtgcatcatgggcgagcgcgagcccgagatcatcgcgtgcgccaagcgtttcctcaaacgcacgggctaccgcggcttcgcgaacttcgacatcaagctggacgagcgcgacggctcgttccgcttcttcgaggtgaacacgcgctgcggccgcaacacgtactacatgagcctgggcggccagaacttcgtcgagctcatcgtgcgcgagttcctgctgggcgagaccatcgactaccgcgaggcgtacgatccgttcgtctacagctgcgtgccacgctacgtgctggatcgcagcatggagaaccgcgcgcgcctgcagcaggccctcgagacgctgcgccgcacccccgagccctacccgttgcactacgcgcccgactcgttcatgcacaacgtctgggcgaaggtgatgcacgtgaaccagatccccaagttcaagcgcttctactgggacaccgacggcaagcagctgaagtagcgaacagcccataaggggacggtcctcatttggaacatttgcgtgaagaaggagcaaggatgaaacgttcagggttgatcgcgatgatcgcgctcacgctgctcccgctcgtcatgaccgggctcgccgtcctgttcgtgctgcccgacaccatcccgcttcacgcaggcgcaggcggcgtcgatcgcgtgggctcgaaattcggcgcgttcgagataagttccttcttggtgggtttcggcgtgctggccactatcctctacgcgttcatggacaagctggccgcgaaatatcaaagcgacgcgcacagcggacgcgtcctgctcgtgttcgccctctccctcatgaacgtctggcagctcgtcttcatcctctggatggcaaccggtgtgtaaatgcccaaaaggcgcccgttcccaatggggacatttttctacaccggtcgcctatgcccctcttcggtggtcaggatcacggggccgtcctcggtgatggccaccgtcttctcgaagtgcgccgacggcaggccgtcgcgcgtgcacacgagccacccgtcgggcatctggcgcgtcttgtacgtgcccaggttgatcatcggctcgatggccagcaccatgccctcctccagcttcacgccggtgtgcttgcggccgaagttcggcacgttgggatcctcgtgcatgtcgcgcccgatgccgtgccccacgtactcgcgcaccacgccgtagcccgcttcctcggccacgctctgcacggcgtggccgatgtcgcccagccggttgcccggtcgcgcggcgtcgagcccggcccacatgcaccgctcggtcacgtccagcaggcgcttcttctccggcgagatcttccccaccgcgtacgtccacgcgttgtcgcccacccagccgtccacgatggcgcccgtgtcgatggagatgatgtcgccctccttgagcaccacgctgcgcgaagggatgccgtgcacgatctgctcgttcaccgatgcgcagatggagccggggaacccgccgtagcccttgaacgcgggcacgccgccttccgcccggatgagcgcctcggccagctcgtccagctcgagcgtggacacgccgggccgcacctgcgcgcctacttcgcgcagcaccttggccgacacgcggcccgcttccttcatggcctcgatctcggccggggacttcctgatgatcatacgcgttcgcaccttgccttgtacgccgttgtttgccgtcgcccagtatagcactgccgccccggcttccgaggccgttacatccctcccacgaccccgaaacgcctccgcggcgggcggcaacgcgcgcgagcgccgcctctagcatggcaagggcaaccgtcagcaaacgaacaggaggctctatgaacccgtttgaccagaaaccgacgaaatcccttgaggacatgatgctggactggaaggatctttcgccccgcccttacaagaagctggaaaccgatccgtacaccaaggcgcgcatcatcctcatgaacggtatcgaggtggaggccgtgatgttcggccacaacttcaaccgcaactgcgaggacaacgacctgcgccgcgacctcgccctcatgcgccgcatcgaggccggtcagcagaagcacgtgaactggctgtcgccctccgacgagacgccgcttgagaccaccatcggctacgagcagctggccgtcgacctcacggcctggctcgccatgcacgagcccgacgcgtacgcgaaatcctgcatggacttcgccctgctcgaggacttcgaccacctgtaccgctacgcgaacctgctcaaggtcgacgaggacctgcccgcccacgagctcgtgctcgacaccatcgagatcacgccgggccgtcccaccgtcgcgcaccatcgccatccgttcgactcggtccgcgccccgcgcaacgccaagaccgccgacatccgcacgatcctcggcgcgctcatcctgacggccggcgagcagcagaccatgaacttctacatgaacctgggcaacacgcagcccgaaggcatcgcgcgcgacctctacctggaaatcggcatggtcgaggaagagcacgtcacgcactacggcgcgctgctcgacccttcggccacctggctgcagaacctgcttctgcgcgagtacatggagacgtacctgtactattcgttctacgagaccgaggtcgacccgtacgtgaagaagatctgggagcagcacttcgagcaggaagtcgggcacctgcacaaggccgccgacctgctgtacaagcacgagaacatggaatggcagtcgctcatccccgacggcgagttccccgagcttctggacttccaccccacgaaggactacgtgcgcgaggtgctggacgagcaggcgaccctcaccgcgaaggaagaggagttcgtcgaactggacgagctgcccggcgactaccgcttcttcggctggaacgaccaggtgaacggccgcattcagaacgtgcccagccaccgcgtcatccgcgaggcgcagaagaaggacggcgaggactaccgcatcgaggaccagcccagcccggtgcgcgcgctgcgcaaccgcaaggaggacaacacgaagctcggccgcgtgcagggctccgagcacgactcctcccgcgctccggcgcgcgagaagctggaagaagtcgtcgagcgcgaagaggtgctggcgtaaccgccctcccctttcctgcccgaacgaacggaagcgcccgcggaatcactccgcgggcgcttcttcgtctcccgtgcgtcccggatgcccgggctgccggccgccttcgtccttgaggcgccccgcgtccttgagcgcccggcgcaggatgaactccacctgggcgttcacgctgcgcaaatcgtcggcggcccaccgttcgatgccggcccacacctccgaatcgatgcgcaggggatactgttttcgcttcgccatagcttgccaccgaagctgcggcacggcgcgtggcgccgcgccgcagcgttccttcctactggtacagcgttcccgtgttcagcacgggctgcgcgtcggactcgccgcagagcaccaccatgaggttcgacaccatggcggccttgcgctcgtcgtccaagtctaccacgttcttcgccgacagctcggccagcgccatgtccaccatgctcaccgcgccctgcacgatcttctcgcgggcggcgatgacggcttcggcctgctggcggcgcagcatcgcctgggcgatctccggcgcgtacgccaggtgcgtgaggcgcgcgtcgtcgatgaccacgccggccttctccaggcgcaccgccaactcttccttgagcgcctcggacacctcctcgatgttgctgcgcagcgtgatctcgtcttcgggctcgccgggcatctggtcataggcgtacgtggtggccacatgacgcagcgccgtctcgctttgcgtatgcacgtaggtgttgtagtcgtccacgtcgaacagcgctttcgccgtgttctcgacgcgccacacgatgacgtcggcgatctcgatggggttgccgcacttgtcgttcaccttgaggtgctcgccgttgtacgtgcgggcgcgcagcgagaccttcgtggacttcgcgatgggcttgcccgtggccacgtcgaccgtggagccggcgttgcgggagtagaacgggttggcccagtggaaaccttcgtcgcgcacggtgcccttgtagtcgccgaacaggatgagcacgcgcgcctggttcggctggatggtgaagaagcccatcagcagcaggacgggcgccacgcatacggcgacgatgcccgccaccagcagcgcaatgccgagcgtttgcgtcgcggtcgtgataggcgcatcatcgggcggagccatggtcgcccccgtcacgatcaacgcgacgcacagcgcgacgacggcgagcagaagcgccagcatcggccagccgctccttgcatgaacggtcttctcgacggacatgatgatccctttctctctcaggctccgcgccccatgcgctcgcccgccacctcagcgaggtgatacgaatatgatatcacattgagatcgttataggaagcgtgggggcgaagggctccgcatcgccttcctcccccgtcgagtataggcgtctcagagtgtttcacgtgaaacatttgttcgttcatgatgcaaaagaaaaggagcctctcggctccttttcttggttcgtgctcgtgcgcttattcagcggcgggctccgtgtagttgcggttcacggacggatcgaccttcacgccggggctcatcgtggaggacaccgtgatggacttcacgtacttgcccttcgcggcggccggcttcatgcggaggatctcgtcgtacacggcgccgtagttctcggccagctgctcggcggtgaagctcaccttgccgaggatgacgtgcgcgatgccgtaacggtcggcgcggtactccacgcggccgcccttgagctcgttgatggccttcgccacgtcgttggtgacggtgcccagcttcgggttcggcatgaggccgcgggggccgaggatcttgcccaggcgaccgaccttgcccatctgatcgggcgtggccacggcggcgtcgaagttgaactcgccggcctggatctgctgcgtcagctcgtcggtgcccacgatgtcggcaccggcctcttcggcggcacgagcggcttcgccctcggcgaacacggccacgcggacggtcttgcccgagccgttcggcaggctcacggtgccgcggagctgctgatcggcctgacgggtgtcgatgcccaggcggaagtccgcctccaccgtctcgtcgaacttcgcgaacgagacctccttcacgagggccatggcctcgaggggggcgcgggtctcctcgccgaccttctcgagagcggcgcgatagttcttggaaagcttcgtcatggttcttcctttcgtggtgagtagcgagcgccctcggcgcccttccactgcgttctatcgaacaacggccgcctttccggcggccggtcattccctacgtcgggcagctggaggctagtcttccagcgtcttgccctgaagcatggccgcgaccttcttggagggcacgtacttgatcttcatctcgcgaccctcgatgcgcacgcccatgctgcgagccgtgccggcgatgatctccatggcggcctcgatggtgttggcgttgaggtcgggcatcttgatctcggcgatctcgcggagctgatcctccgtgagcgtgccgacgggctgcacgtgcggcaggccggaaccgctgttgatgttcagcttctccttgatgaggacggccgccggcggggtcttgcacacgaaggtgaacgacttgtcctcgtacaccgtgatctcgaccgggatgatggtgccggactggtcctgcgtctgggcgttgaacgcctggcagaactgcatgatgttgacgccctgggcgccgagggccgggccgaccggaggagccgggttggcggcacccgcggggatttgcagcttgataaagccggtttgcttcttttcagccatgagagcttcctttcagctgagtaaaatcatctagacaaatctatcaacaaagcggcataggtcgaatgagaagccccggtccacgcgggcacgcgacgccgcttgtgttcgcacctttaaatcttggccacctgatcgaacgaaagctcgaccggagtctcgcggccgaagatggagaccatgaccttcaccttgccggcatcgggcgacacctcggacaccacgccgtcgaactcggcgagcggacccgagaccaccttcaccgactgccccacttccaggctcgacgaagtcttcttcggagcctcgcggctcgtgcgcttcatgatcttgttgtactcgtcgcgcgtgagcggcgcagggttgccgtcggcacccacgaaccccgtcacgcccggggtgttgcgaaccgcagcccagctgcgatcgtccagctccatgcggacgagcacgtagcccgggaacaccttcttctcgctctcgacgcgacggccgccctctttgatctcggtgaccatctcagtcgggatctcgatgccgaagacgttgttctcgagacccatcgtctcaatgcgcgtctcgaggttcttcttgaccttgttctcgtatcctgaatacgtgtgcaggacgtaccacttcttcgccatgcgcttagacccccaaaccggaaattgcaatcagcagcggcgtgatgacgacgttgtcgagcacggcaacgtacacgccgaagaacacgagcgcgactaccacgacgacgctccagcgcaggacgtcctgcttggtcggccacgtgacgcgcttgagctccgagcgaacgtccttgagaaacccgaaacgacgcttcttcgcaggcttcttctcaggagccttctcgaccttcttctcgacggctttcgcagaggccttcgcctgcttgccgccgtccacggccgcgtcgcttttctcggccttcttgaagaaccgcttcttaggcgcctcggtcgcagcagcatcggcctcggcgttcttgttcgccttggcagcggcctcttccttcagcgcctgctccttgcgggctgcgcgtgcggcagatgccttcgctcgctgtgtctttgatttcttcgccatctgattccttaaccggggattcgtatccgtgtaaacgccaaacaagcagcctgatcacaagctgctcatccaagcaacctgatgcaagctgctcatatactcgagctggcaggccaggagggactcgaacccccaacatgcggttttggagaccgccgctctaccaattggagctactggcctatgctcgtgcaaacctctgacgcgctatcgggtttctttatgcaccgtgtggcacttgcaccacttgcagtacttcttcaactcgatacgatcaggattgttctgcttgttcttcttggtcgtgtagttacggcgcttgcactccgtgcacgccaaagtgaccaacgtacgcatgaattctcctttatgcctcaactgaaacgagcttggatctcatacacatgaattttcatgagcggggcccgcttggagcgggccccgccggatcacgctaaaacggtgttacttgatgatcttcgtaacgcgaccggagccgaccgtgcggccaccctcgcggatagcgaagcgcaggccctcttccatggcgatcgggtgaatgagctcgcccttgatctccacgttgtcgcccggcatgaccatctcggtgccctcgggaaggtgggcaacacccgtcacgtccgtcgtgcggaagtagaactgcggacggtagccgtcgaagaacggcgtgtggcggccgccctcttccttcgtcaggatgtagacctggccctcgaactcggtgtgcggggtcacgctaccgggcttgcagagaacctggccgcgaacgatctcctcgcgcttgacaccgcggagcaggcagccgatgttgtcgccggcctgagcctcgtcgagcagcttgcggaacatctcgataccggtgcagaccgtgttctgggtctccttgataccgacgatctccagcgggtcgttaacatgcagcgtaccgcgctccacacgaccggtggcaacggtgccacggccggtgatggtcatcgtgtcctcgacggccatcaggaacggcttgtcgaccatgcgctccggcgtcgggatgtaggagtcgacggcgtccatgagctcccagaccttctcctgccactctttgtcgccctcgagagccttcagagcggagccgcggatgatcggggtgtcgtcgcccgggaactcgtaagagtcgagcagctcgcgaacttccatctcgacgagctcgaggagctcctcgtcgtcgaccatgtcgcacttgttcaggaagaccacgatgtagggcacgccgacctgacgggcgagcaggatgtgctcgcgggtctgggccatcgggccgtcggtggcggcgataacgaggatggcgccgtccatctgagcagcacccgtgatcatgttcttgacgtagtcagcgtgaccggggcagtcgacgtgagcgtagtggcgggaatccgtctcgtactcgatgtgagcgatggagatcgtgataccgcgctcgcgctcctcgggagccttgtcgatgttctcgaacgccgtgaagtcggcacgagcggagccgtgcgagccgtcgttctcggacagcgtcttggaaatggcggccgtcagggtcgtcttaccgtggtcgacgtggccgatggtaccgatgttaacatgcggcttggaacgctcgaacttctccttagccatgtttcatcctccttataggatattttcgcgaaacgaaaacaaaataacgacgcgtccgacaaagcggacgcgaaataatacaatggtagcggtgactggatttgaaccagtgacgccacgggtatgaaccgtgtgctctaaccaactgagctacaccgccaggtagcaaaaaatggagcctgcgatcggacttgaaccgacgacctcttccttaccaaggaagtgctctaccgactgagctacacaggcgaaaaatggtgggcgcgctaggattcgaacctaggtaggcatagccaacgggtttacagcccgtcccctttagccactcgggcacacgcccataattcgctgcttaattcatgtgtatttatcaagctgcctgccgcgcttttcggtgaacccgaacgcgcgagcaggagaataatacgctaggaacatcggcgtgtcaactgtctacacgcccccgggcgtgtctccacgattcctccttttctcgacctctccgcccagcgaatcgagcgacgacctcgcagaagctcatcgcccgccgccgtcccggcgttccaaagtttcgcgaatcggcaaatacgctttcacaagatcgtcgaggcgcatgcgcgcgttcgcaggactggtggaaggaagtcccgtgtgcgcaaggccgggaagctgcggcgcgccgaagcggcgatagagcgccgtcgccttcgagcccgtggtgaacacggcttcgagcggcgccgcctcggcaatgcgcgaaagatcgttcgcaacggggtcgacgatgctcgcatccgaagctccgacgatagcgcaggacgacagaacgtcccaaagagcgatgccgtgcgcatagagaaacgccgtgcgtccctcgatgccgagcggctcgggctcgtcgaacagcgcgcccatcaccttccagaaccggttttgcggatgcccgtagtagaatccgatctcgcgcgatttcggagaaggcatggttcccagcacgagcacgcgcgaatcgactgcatatataggttcgagcggatgctcgatgcgaacggcttccacgagccctcccctatgcgcggctgggcagctcgagcgaagcctcgtccagcacatgcccgcgaacggcgcgcctgaactcgttgaggaagtagccctcggacaaaccgagctcgcaatcgagcgcgtacacggtcagcgtgtagtcgtgcgtcttgtcaggcgggtacgggcccgcgtaacgatggatgatccgcgggtcggtatggctgcctgccagaggcgaccaatcgctgttcgagccctgtacgcaagccagctcgcccgaggcgctggcgttctcgggaacgagcgtcgtgtccggcgcgatgtcgcacgcaagccaatggatccagcagaagccgcccacggggacggcgtcgtagtcgagaaacgtgagcgcaagcgagcgcgcgccttcgggcacatcggcgatttctatgggaaacgagcggacgggatgcccgtccagctggtacgcttcgggggcgtgcttgccgaagcgatcgggcagcagcccgttgtcgagcccgacggatatgcgcatggtcgatctcctttcgcgcggaaccaacggttggcaccgtagtatagaagaagggagggccgaagccctcccttagtgatcgtatgaagccttagaactgcagcgcgttcgtgaactgcgcccacgacagcggatcggtgtcgcgcacgtacgcgttgaaagtgggagcatgcacgtagtgcgagccgcctgcactcaccgcgatgccgacgtgaccgtagcgccacagcacgtcgcccggacgcgcctcggaaaccgatacgacgcgcgcggctgccgcgtactgcgcctcgctctggtgcggcagatacatgcccacctggcggtacgcccacgtgaccaagccggagcagtcaaaggagtcggggccttcggcaccccagatgtaggggcagccgatacggctcatagcgtagcccacgaccgagtcgtaggaaccgaccggacgggacggatacactacagaaccgccgccaccgccgccgccggacgaaccgcttccgccgccggagccggaacctgaaccgccgctagcgccgccaccgccgccgccgggattcaccgcctgctccgcctggcgctgacgctcggcctcggccgcagcctccgccgccgcagcggccgccgccgcagcctgctcctgctgaaggagctcctgcgcttcggcatcgagggagctgaccagctcggtagcctggtcgaccttggcctggacatcgctttggatctgcttggcttccgcagccttggccgaggcgatttgctcttggcgagcgaattcgtccttggcagcctgcagctcttcgcgcaaggtcttcgtctggtcaaccatatcggcgtcgttctcgttcatcttgttgagaagatcccaattctgggtgaactcttcgaacgaggcggcacccaggacgaaatcgacgaagctcgtggatccgttgcggtacatgttgcgggcacgcgtgcccagcttgtcctgcagatcgctgatctggctgttagcgtcgtcgattttggcctgctgatcctccatcgccttctgcgcggcatcgcgctcgtcgagggcggagtaatagctgatttcggcagcctcgagatcggcctgcaagccgatcagctggttgcgcaccgcatcggcctcggcctgcttctcagcagccgtctctgcgaacgcggtcgtcggagccagaacggaaagggcgccgagcgcggccgcgccggtgaggaatgttcgcctgctcagtccgattgtatgctcgctcatgtatgaaatcctcctagattgagcacgtagtatgtatgggcaaaagctgaacgcatgataccacgttcgcgccgatggtcaaaaaaggttgtgaacgcgtttcataagcccagttcaaagccgccacatgggacgatgtcgaagtgccgcagccgtatccttcccgtcacgaaaccacaaacaagccctccatcaggcatgacgggaaaagaggaggccaccaagtgttgtggtggcctcctctagatgttgtgcaaccgtgaacgatccgactactgcacgaccttttcgacggcggctcccccttcgtccatgtaatggtcgaactcgttcgcgaccgcctccgacggggcgggcgtgagcagcgacacgatgacgatggcggcgaacgacaggacgaacgcggggagcagctcgtagatgccgaacacgccgccgagaggcttgatgaagttgtgccagacgagcaccgtgaccgtgccagtgatcatgccggccagcgcaccctgcatgttggcgcgccgccaatacaaggcgcacagggtgagcgggccgaacgaggcgccgaggcccgcccaagcgtaggacaccaccccgaagatagaagagttctcgtcgtacgccacgatgatgccgaacatgaacaccgcgatgagcgtgaggcgcgccacgatcatgacctggcggtcggtggcgtctttcttgacgaccccgcggaagatgttctcagccaccgaggagccggcgatcagcaggtacgaggacgaggagctcatcgacgccgcgaagatgcccgacaccaccacgccgcacatgaacggcggcaggatcatctgggacagcacgatgaacacgttctcggcctgggcctgcgtggcgaagtcgacggggatgatgacgcggcccaccaagccgatgcagatgccgcaggccagcgacacgacgcaccacacgaccgcgatgacgcgcgacttcttcacctcgtcggccgagcggatgcccatgaagcgcacgagcacctgcggcatgccgaagtagccgaggccccacgccagcatcgaggcgatggtgatgagcgggtactcggccgcgtcgccgaacagaggagccccgttctccacgagctgtctgcctgcgtcgtccacgaggggcaccgctatctgggtgccgctgaggaagccggggatgctctgcaggaacgcgacggtgttgtcgacgccgcccgcccaggcgaccgagcccacgaacacggtggccagcgcgaagaacatgagcacgccctgcacgaagtcggtggtgaccaccgaaaggtagccgccgaccagcgtgtacaaaaacacgatgatggcgccgagcaccatcatcgtggcgtagtcgaggccgaacagcgtggcgaacagctttccgcacgtgacgaaacagctgcccacgtacacgcagaagaacaccatgatgatgagcgcggccaccgtggatacgatgttcttacggtcatggaagcgcttgctgtagaattccggcagcgtgatggaatcgcccgccaccacggaatacttccgcaaacgcttcgccacgaacttccagttgagatacgtgccgatggcaaggccgatggcggtccacatggcgtcggacgcaccggtgaagtaggccacgcccggcaggcccatgagcaaccagcccgacatgtcggacgcctccgccgacagcgccgtgagccacggccccaccccgcggccgccgaggaagtactcggccgtcgacgagttcgagcgcttcgcgtacacgaacccgatggtgagcaccgcgacgaaatacaggagcatcgcgaatacgacccaaaaatcgttggaaaccacaggtgtctcctcccctcttctctatgcgaaatgagggaattatacgacaacggcgcgggtcgaagcgcgactaattgcggcggaggcaggtcatcgcccccgccgccccgcctcatgcaggatgaagggacttggaacgaagcctacttttcggctttctcggggtggccgtggtccttctgccagcgatcccaagtggagtagcagatggcggcgcgctggtcttgatcggggaacttgtccttctcgtagcgggtgatgtgctccatgcagcgcgagatgtaggtttccttcttctcgttggcgcgcgggtcgggtatgggcatgagggcctcctttcgtcggatgcccgcatcgtagcgcgcggagcttccggcgcagcggagggcggcggagccgttgcacgcgggacaccggaccgtcgttcggcgaaaacgctatcgacggcctttccccttaaccttatactggggatcgtacgcacgactcacaatggaaggaagcacgatgcccacgtacgcggagatggataacgttcagctggcagcgctcaaggaggagctggagcgcgagtacggcgagatcaaggcgcgcggtctggcgctgaacatggcgcgcggcaagcccgccaaggcgcagctcgacctcagcatgccgctgctggaaaccgtgaccacgatggaggactgcgtggccgccgacggcaccgactgccgcaactacggcgtgggattcggccttcccgaggccaaggagttcatggcctgcatgctggacgacgagccggacaacgtcatcgtgttcggcaacgccagcctcaacatcatgtacgacaccgtggcgcgctgctggatgttcggcacgctgggctccgagccgtggggcaagctggacacggtgaagtggatctgccccgctcccggctacgaccgccacttcggcgtgaccgaggagttcggcatcgagatgatccccgtgccgatgaccgacgaagggcccgacatggacgaggtcgagcgcatcgccgcctccgacgcctccgtgaagggcatctggtgcgtgccgaagtactcgaaccccggcggcacgacgtattccgacgagacggtgcgccgcctggccgccatggagtgcgccgccgacgacttccgcatcttctgggacaacgcgtactgcgtgcaccatctgttcgacgacgcggccgagcaggatcagctgctcgacatcgccgccgcctgtcgcgaagcgggaaccgaggaccgctgcttcaagttcgcctccacctcgaaggtgacgttccccggcgcgggaatctccgccttggcagcgagcccggccaacatcgccgagatcaagaaacgcgtgggcgtgcagaccatcggccacgacaagctgaaccagctgcgccacgtgcgcttcctgcgcgacgccgagggcctggcggcgcacatggccaagcacgccgccatcctgcgcccgaagttcgagctggtgaacgccaagctgcaggagggcctcgacgaggtgggcggctgctcgtggtcgaacccgcgcggcggctacttcgtgtcgttcgacgcaccgcaaggctgtgccaagcgcgtcgtgaccctggcgaaggaagcaggcgtcacgatgacgggcgcaggcgccacgtacccgtacaagcaggatccgaacgacagcaacatccgcatcgcccccaccctgccgccgctggaggagttggacgaggctatggacgtgttcaccgtctgcgtgaagctggcctacgtggagaagctgctgggctagactgcacgcccggcttgcgatcgttcggaaggagccgccctcgggcggctccttttcttgttcggggcatgtaaggcgcacaggttggcgcagtccgtaggccgccggagccgtcggaaccgtcagaacggcgagacgtagaggcgcatgccgtcgggaaggcgcaccaaccccgcatcttgcaggacttcggcaagcggggaatccaggatcgatcggccgttgagcgtttccacgaccaccttcttgcgggcgccttcggctccggcgcgcctgagggagcgcttctcgtgcgccacgagggcccgcgcggcccgggcgagcgcgtctccgtcgtccgtgaacgacagcagcgagcgcaaccccgccgcagcgtagagcgccggcacgccgcccagcacgacgacgaggctgcccgcgcgacgcgtcggacgggcttcgtgctcctccgcgccctcggcatcggcgcgcgcgaccggcggccaaggcaggccggcgccgtacaggcacgcgggatcgtcggcggcgagcacgacgggctcgcgtggatcggcctcgccgtcgcccgcctcgtaggtgcgcagcacgtcgatggtctcgcgcgcggcgaactgcgcggggccgaggccctgcacgaacgcgccgcgcagcacatcccccacgtcctccatctgccgcagcacgggaagcaacgcggccagcccaccgggcacgcccgacagctgcaccacgtcgcgagacagcacgccgtagcgatcgaggatcgattccaccagcgcgatggcgcgcaccgtgtcgttctccggcgacggcatgatgagcgaccaccgccccgtcagagccgcgcccaccgcggcctgcgcggacgctatgccccgcatcgtcggcgaatcgacggtgcgcatggcggaccggcggctgctcacgcgtcgacgcggcgcgctgcgcggcttgcccgcagcagcgcccgcgccttcgagcgaggcgcgcaccggcgcgtacgtgtcgttcgtcgcgcgcccgtcccacatgagctcgcgcatggtggaggctacgaccgcctcgtcgacgaactcgggcgcaagccgtcggcgcaccgcatcgacgatctggcggaagaacaagccgcctccgaacccgagcgcttccaccacggccgcctcgaccgacggcgccgccgagccttccggcttcggcccgtcggacggcgcatcggccagatcgggccgtacgggcgcgaacggcgaatcggtgggatagaacgcgacgaggcctgcggcttcgcgctcgcgggagctgcgaggccgcggcgcccgcccatgcccatcgccctcgtcgccttcgcggcgagcgcccgcccacaccacgtcgcctgaagccagcagctcgtcgagcatgccgggacgatagtcgcgcacgcggctggggaacacgtgcgcctcccaggccgaagccggcaggaacacgccttcgaactgggcgatcacctgggcgagtccgtcgatgccctcgaatcgctcctcgcccagcggccctgctccttgcaggtcgatcaggaagcgcgcgaacgcgctcgggctcaccgcctgcacggcgcggcgcgcttccgccaacgacagcgagcgcagacgccggaacacacccgtctcgacccaggcgcgcgcccgcccgtccccgtcttccccgaagcggccctgcatgaggcgccccgccgaggcgaggcgggcgaggccgtcccgggcgacggcgaccccgatgccgaagcgcgccgccgcggcctcggcggagaaggggccgtgcgtgcgcgcgtagcgtgcgagcagttcgtccagggggtggagcgcatcctcgccgccatcgctttcggccgacgccgcacgggatccttcgatttcgcgctgcgcgcttcgctcgggatcacgtaagggggcttgcgcttggccggattggctggcggggcggttgagcgcgtcggcccacggggggatcgtcgcgcccagcgcatcgcgcagaaacgccgcatcgtcgacggccgcccagagctccttgccgcccaacacgaccgtaaacgcccgatgggcgcgctgcagctcttcgagcagcgcatgcgcttcctcttcggtggccacttcgccgcccccttcgtccgctgccccgtcgtcgtccgcttcggcgtccgaacgcatgcgcaacgccgcctcctcgacggacagcggccccagcacgcgcagcaagtcggccgcgccctcgacgccgcgcatgcgccgatcgggagcaaggcgctgcaagccggcctccacgccggcgatcacgtccgcgtccagcacgtcgcccaagtcggtcgagcccagcagctcgcccagcagcgtggggtcgagcgacagcagcgacgcgcgttgctcggcgtgcggcaggtcgcccgcgtagaggcgctcgcccacgtacccgaacagaagcggcgccgcgaacggcgacggcaccgacgtctgcgcctccaccaagcgcaccgatcccgcctgcacctgctccatcagctcgtgcagcgccctcatgtcgtacacgtcctgcaagcactcgcgcgccgtttccaccaggatgggaaactcgcgctcgcgccgggcggcctccagcagctggccggccttgaggcgctgctgccacagcggggcgcgcttgcccggcgcgatgggcgacatcagcagggcgcgcgcggcacattcgcggaaccgcgccgagaacagcgacgtggagcccacgcgatcgcgcacgatgcggtcgagctcgtcggggtcgaacgcgaacagctcgatgccgggaaggcgggtctcggtcatggggatgcgcaggacgatgccgtcgtcggccgccatggcctgcgcatcgtagccgtagatcgccatgatgcggtcggacaccgccatcgcccacggctcgtgcacgcggcggccgtacggcgaatgcagcagcacgcgccagtcgccctgctcgtcctcgcagcgttccaccacgagcgtcttgtcgtcggggatgatgcccgtcgccgcgcgctgcgagcggatcagctcgacgaggttgcgctgcgcatcgtcgtcgaggccgtctgcggccaagcgctcgcgcacggcgacggcgacgccgaaggcgccgtcgtccgtctccgcgtcgtttccttcgatgccgccggcgatcgcgcgcaggaacgcgccgcgcatgcgccccgtctcggcgggccgccctgccccttcgccatgccagaacggcagccgggcggatctcccgggcgcaggctccacgatcacgcggtcgcgcgtgatctcatgtatgcgccatgagctggtgccgagcgtgatgatgtcgcccacgcgcgattcgtacaccatctcctcgtcgagctcgcccacgcgccgccggccctcgttgcccccaccttcgggaagcaccaccgagaacatgccgcggtcggggatggtgcccgccgacatgacggcctggcgctgcgtgccgggacgcgccagcagccgcccgcgctcgcgatcccacacgatgcgcggcgagaactcggccaaatcggccgtcgcatagcggccggccagcatgcccagcaccgaatcgaaggcccgtcgcggaagctcggaatacggggccgcgcgccgcaccgtgtcgaaccagtcgtccgccgccagctcgtccatggccacggcggccaccgtctgctgggccagcacgtccagcgcgttcttcacgaacgctgtctgctcgatgcggccctcgtacatgccttcggccgccacggccgcgtcgatgatctcggtgcgggtgcgcgggaagatggaccccgtcgagcggccgcccacctggtggttcgcgcgcccgatgcgctgcagggcgctggccaccgacggcggggccgccacctgcagcacgaggtcgatggatcccatgtcgatgcccagctccagcgacgaggtggccaccacgcacggcagctcgcccgctttcagctcgcgctccacctgcaggcgcttctccttcgacaccgatccgtggtgcgccttcgcgatgacggccggcgcgcccgtggacatgtccgccgtggagcccagatccgagcggatgggcgccgccgcggcgtccatatcgacgccgcgcgcgatgcccatgcgcttcgcgtacagatcgttcaggcgcgccgtcagcttctcgcacagcccgcgcgagttcacgaacacgatggtggtgcggtgcgccagcacctcgtcgaggatggaggcttcgatgtagggccagatggaagacgagccgagacggctgtcgggactcgtcgtgctcgccgggagcgaagacttcgccatggcggcgcgcagggcgcgatcggacttccacgcttcctccgcaggcgcgaggcgcggccctcccccgcgctttcccgcgccgccccccgtcaggtcgcttcccccgaacgtcggcacggcggtcatgtcgcgcacgggcacgcgcacgcgcacgtccatgtcgggccgcccctcggaggcgacgacgcgcacgggatggggcccgcccaggaagcgcgcgatctcgtcgcgcggacgcacggtggccgacagcccgatgcgctgcgccggcttttccagcaggtcgtcgaggcgctcgagactcaaagccaggtgcgcgccgcgcttgcttcccgccaacgcgtgcacttcgtcgacgatgacggtttccaccgtgcgcagcgtctcacgcgcctgcgacgtgagcatgaggtacagcgattcgggcgtggtgatgaggatgtcgggcgggttgcgctgcaggctacggcgctggtcgggcgtggtgtcgcccgtgcgcatgcccgtgcgcacttcgggcatcgcgccgcctgcggccgccatgcgcgccgcgatgccggcgagcggcgcctgcaagttgcgctccacgtccgccccgagcgccttcagcggcgagatgtacagcacgcgcacgcccttgccgggacgctccttcttcggcaaacccgccgtcgccgccttctcgcgcataagctcgtcgatggcgaacaggaacgccgcgagcgtcttgcccgagccggtgggtgcgatgaccagcgcgttctcgccgccctcgataacgtcccaggcacgctcctgcaacggcgtgggctcgggaaaggcatcgaggaaccagccgcgcacctcgtcggagaatcgcgtcagggcatgaggggtgggctcgcgtgcttcgtccatggcgtgcgtcggctccttctgaaatcgggtgcccccatggtagcgcatgagcacccgcccgtcttgcgcaatgggcggctgaaacccgcccgttcgcatgacggcccgaagctctgcgcatcgcggtgcggatagacgcactgggcacgaatcgcaattggcttcaccccgaaggggaaaccgaccacgtttcactcatatgcgtccgatcacgcatctcgctagatgaccacctcttcgtagtccaatccgaagtccttgcgcatccagacgaagaattcgtcgcagtccaccactttgatcaccgacgactcgaaatctttctgattgcgggtgactatggcatcggcgcgcatctccaatgctgattcaaagataagcgaatcttccgggtccttccacgaggctgccagcatccgatcgacctcccgatcgctgacggcatgcacgttcacgaacgtccgcatccctcgcagctgctcaagcacacgcgacaacagcgagcgcttcccgccctccgagaggatgtagataagatcggtcacctgcgacgaggtgatccagagatcgaattcccccacacgacccgccgtcatgagcaagcgaaccttatcgtaataaggctcgcgctcatgcagataatcgataacgacattggtgtccaacaggagcttcatgcgagccatatcacatcatgcccctcgaacgcaggcgctccatcctcacctctgccttagtcatatcgtcgaaacgagaagcacgcttcgaggatagagaatcgacgaaacgagaagcagcggcccacttcgcctcatcgccgatacgactcgaatcggctcgaaggaaacccgcctccccctcctcgatcattttgtcgtacatgaggttgatcgcttgagaagcgctgagaccctctcgcgcaaggatgcgagcgcctttgcgcttcttttcatccagcatgcgtgccgtaaccatagaatcgtccatgccgactcctttcgtgtgctcaattgtacaaccattttcgtacaacatcaacgaagaacaactctcggacgcaaaaagcccccgacgctcgttcgcgtcgggggctttcgttcatcgtgttccttgaaaactacgcttcggcgtagacgtccttgagcttgagcaggtgctcgtagcggtccatggccgccttctcgttgcgctcgaacagctcgctggcgcgctcagggaactcgcgggtcaaacggctataacgcgcttcgttcatgaggaactcctggtagccgcccgcgggctccttggagtccagcgtgaacttcttgccgggctcggcggccgggttgaagcggaacaggttccagtagccgcagtcgacggccttcttcatctcgtcctggcagttcgccatgccgcccttgatggagtgcatctcgcacggcgagtagccgatgatcagcgacggtccgggataggcctcggcctcggcgatggccttgatggtctgggccggcttggcgcccatagcaacctgcgccacgtacacgtagccgtacgccatcgcgatctcggtgaggctcttcttcttgacgtccttgcccgcggccgcgaactgggcgacctggccgatgttggttgccttcgaagcctgaccgccggtgttggagtacacctcggtgtcgaacacgaacacgttcacgtcctcgccggatgccagcacgtggtcgaggccgccgtaaccgatgtcgtaggcccagccgtcgccgccgaagatccagacggacttcttgttcaggtactctttgttctgcaggatctcgggcgcctccgggcaaccgttctcgacagcagcctcgagcgcgggaacgagcgcctcgacggccttggcgttcgcctcgccatcggccatggtgtcgaggtacgccgcgataagatccttggtctcagccggcgtcttgtcgttagctgccatggcttccaacttgccgaccaggcggtcacgcaccgcctcgtgacccagcaacatgcccagaccgtgctcggcattgtcctcgaacagggagttcgaccacgcaggcccgcgaccctctgcgttcaccgtatacggcgacgtagcggccggaccgccccagatggacgagcaacccgtggcgttcgcgacgtacatgcgatcgccgaacagctgggtgaccagcttggcgtacgccgtttcggcgcagccggcgcaggcgccggagaactccagcagcggctgcttgaactggctgcccttgaccgtggcatcctcgagcgcaggcttctcggacacgttgtcaacgcagtagtcgaacacgtcctgctgcgccagctggctttccgtgggcaccatcgtcagcgagtcggaggggcacacgttcacgcacacgccgcagcccatgcagtcgagcggggacacggccagcgtgtactgcaggccggcagcggccttgcccttcgccggcaccatgacggtggcggcgggagcggcggcggcttcttcctcggtgagggcgaacgggcggatggtggcatgcgggcacacgaacgcgcactggttgcactggatgcaggaagcggcatcccacgcgggcacgctcacagcgacgccgcgcttctcgtaggcggccgcgccctgctcgaactggccgtcggcatggtcgaggaacgcggacaccggcaggcggtcgccgtccatgcggccgaccggctccatgatgtcgcgcaccatcttcaccacttcggagcggccctcgagcacgggagcctcgccctcgtccacggcgtttgcccagcttgcaggcacttccacctgtacgaacgccgtagcacccgcatcgatggcgcggtggttcatgtcgacgacgtcctggcccttcttcaggtaggacttcgtggcggcgtccttcatgtactggagcgcctcgtcctgcgggatcacgttcgccagcgtgaagaacgccgactgcaggatggtgttcgtgcgcttgcccatgccgatctcggcggcgaggtcgatggcgttgatagtgtacagcttgatgtcgttgttggcgatgtagcgcttcgcctcggcgttgaggtggtgctcaagctcctccggcgtccactggcagttgatcatgaacgcgccgcccggcttcacgtcgttcaccatgcggaagcccttggtgacgtaggaggggttgtggcaagccacgaagtcggccttgttcacgtagtaggtgctgcggatgggcgaatcgccgaagcgcaggtggctgatggtcacgccgcccgtcttcttcgagtcgtactggaagtaggcctgcacgtacttgtcggtgtggtcgccgatgatcttgatggagttcttgttcgcgcccacggtgccgtcgccgccgagaccccagaacttgcactcgatggtgccctcggccgcggtgttcgggctgttcggatcctcgggcagcgacaggttcgtcacgtcgtcgacgatgccgacggtgaactcgcgcgccggcgcgtccttctcgagctcctggtagatggcgaacaccgaagacggcggggtgtccttcgacgccaggccgtagcggccgcccaccacggtgaggtcggcgcggccctcgtgcgcgagcgcgttgatgacgtccatgtacagcggctcgccgagcgcgcccggctccttcgtgcggtccatgacggcgatcttctgcacggtcgcgggcagcgccgccatgaacttctcggacacgaacggacggtacaggcgcaccttcacgaggcccaccttctggccctgcgcgttgaggtagtcgacgacttcctcaaccacgtcgcagaacgagcccatggccacgatcacgcggtcggcgtcgggggcgccgtagtagttgaacagctcgtagttcgttcccagcttggcgttcacctggtgcatgtagtcctcgaccaccgcgggcagcgcatcgtacacgccgttgcacgcctcgcgatgctggaagaagatgtcgccgttctcatggctgccgcgcatggccggacgctcggggttcagggcgtggtcgcggaactcgctcacggcctccatgtcgcacatgtcggcgaggtcctcgtagtcccacacggcgatcttctgcacttcgtgcgaggtgcggaagccgtcgaagaagttgatgaaggggatgcggcccttgatggcggacaggtgcgccacggcggacaggtccatgacctcctgcacgttcgtctcggcgagcatggcgaagcccgtctggcggcacgccatgacgtcggagtggtcgccgaagatggacagcgcctgggtggccagcgtgcgcgcgctcacgtggaacacgcacggcagctgctcggcggccatcttgtacatgttggggatcatgaggagcaggccctgggaggcggtgtaggtggtggtcagcgcgcctgcggccagcgagccgtgcaccgcgcccgcggcgccgccctcggactgcatctcgcacaccttcaccgtggtgccgaagatgttcttcttcccagcggcggaccactggtccaccaagtcggccatcgggctcgacggggtgatcggataaatgcccgccacctcggtaaacgcataggagacgtacgcggcggcgttgttgccgtccatggatttgaattctctcgtcatattcctctccttcgaaggggatgctcacccgacaaaggcgcatcggggccccgaccttctgctcttgctcagcttgcttcgcctgacagaatacacggcatttatgataccagcccgaaatcgcgttgcggtgcgacgaatacgatgggcggcacgccgcggtcgcccccgtcggtaggcggcggaaggcttgcgcgcggcggtctgggcgcggttccgcacgagccgaacggcccagcgagctgtttgcgcgagcaggaccgttcgagcgccagaccaccgtgcgccagccttctcgctagatgcccttgagttcttttcctagctcctcggcgagagcggggagcagcgcggcgaacgtgtcgtcgatcgtcttcttcttgagctggcattcccagatcacgtggacggtccagcctagctcctccaacgcggcgcggctgcgctcgtcgcgctcgacgttacgctcgaacttcaccacccagtactccacgttgctcttcggcatgctgggcttgcagtgcgggcacctgtgccagaagcacccgttgacgaacagcgccaccctcttgcccggccacgctacgtccgggtgccccggcaccttccactgcagccgataccccgtcaggccagccgcgcgcaggcgctcgcgcaccagaagctcgggcttcgtgttgctgcgcttgttacccttcatggacttgcgcacggcctcgttcgaagcgggcggcgccagcaacttggcgggcgcgggcaacgctggacgcgagagacggacaaccagtgcgggaaacggtcggttttcgcggctgaggaacgccgttagccaactgttacttttatcgctctttcgtatcatgcggcgcatgataccacgtatttcccctggtgaattattctcgtatttgaacaaatataagaacattgatcttacaagttctttattttctgggggttttcccggataatgggcactgctgttgtgcgcgtgcgcaagcacgcacgtacgttcggggcctcctgccccgataccgaaatggagggaaaccaatggaacagcctttgaaagcaactttgtctcgccgcacgttcttggcgggcagcgccgtcgcggcggctgcagcaggcctgactctggccggctgcggtggcggcggcgaaacgacggacaccccgtcgaccgatgccggcaccgacgccggcgcagcggcccagggcggcacgctgaccggcgccatggcctacacgagcacgaacgtcaacccgatcggcaacagctccgcgctgatgctggccgccacgtggcatgtgttcgagggtctgtacgacctcgatctgcacacctacaagacctataacgcgcttgccgccggcgagcccacgaaggtctccgacaccgagtacgaggttgccctgcgcgacggtgccaagttctccgacggcacggacgtcaccaccgccgacgtggtgaacgcgttcgagaagaacatggccgacgccacctacggcgccttcctcgaattcatcgacacggtgtctgcgaaggacgacaagaccgtctccttcacgctgaagtaccccttcgacagcctgctgaagggccgtctgagcgtggtcaaggtgttccccgcctcgctgaccgaggatgatctgaagacgaagccgatcggttccggcccgtgggtgtacgacaccatcaacggcgacgacggcggctccatcgagttcgtgccgaacacgaactacaacggcaagtacgccgctacggccgacaagatgcactgggacatcctgctcgacgacacctcccgcaccaccgcgctgcaggaggccacggtccaggtcatggagaacgtgcccgacgccaacgccgaacagctcatggccgccggcgcgtccgtcgactacatccagggcttcaaccagccgttcttcatgttcaacacgctcaagaagccgttcgacgataagcgcgtccgccaggcgttctactatgccgtggacgtggacaagctgatctccaacgccatggccggccatgccgcgaaggtgacgagcttcctgcccgagagccacgagaactaccacaaggcttccacggtgtacacctacgaccccgagaaggccaagagcctgctttccgaggccggcgtcaccgacctgagcttcgagctgatgacgaacaacaactgggtgaagaacctggccgccggcatcaagaacgacctcgatgccatcggcgtgaactgcaccatcaacgagacgaagatcgactgggcgtctctggccgagtcggccgacgtgctgccctacgacgtcatgctgaccccgggcgacccgacctgcttcggcaacgaccccgacctgctgatgtcctggtggtacggcgacaacgtgtggacccagggccgcagctgctggaagaaggccggcgacggcaagttcgacgagctgcagaccctcatgcagcaggctcgcgaggccaccggcaacgagcagcaggagctgtggaacaagtgcttcgaccttctggccgaggaagttccgctgtacccgctgttccaccgcgagctggccacgggctaccaggagacgcagatcaccggcttcgagcccatcgccacgacgggcctcgtgttcctcggtgcgagcgtgaaggcgtaagcgcgcgctgtgaacccgtagagcaaggcaacccccagggctcgctccgcaaggagcgggcccttgcttttgagaaagaggccctatgagatccttttccattctcggcgattccatcagcacgttcgatggatgcaaccccgacggattcgccgtgtactaccagggcgaacgctgcgagcagaccggcgtgacgtcgagcgccgacacctggtggtcccaagttatcgaacgcctcggcggacggctgctggcgaacagctcgttctccggaagcctcgtggaaggcgccggcttccctgccggaaacagtcaagaacgcatcgacgcgctggccgaagacggcgtgcagcccgatgtcgtcatcgtgttcatgggcatcaacgattacggctggggcggcgcgacggcgcaagccgccggccgcggcaacgccgtgcccgtcgcgctcgatcttgacgccatcgaaccgcacgccccggcagccgccgcgcccggcgcgatcgaccgcttccgcgccgcctacgggctgctgctggaacggatgcgcgcagcctacccgcaagccgaggtatggtgctgcacgctctgccccggacgcgtggccggatgcccgagccccacgttcgcatggaacctgcgcggcgcaccgttcaagagctacaacgacgccattcgcgctgctgcgcgagagcacggctgcaacgtggccgacctcgaggcgttcggcatagactacgaggccgtcgacggcacccaccccaccgcacggggcatgcgccagctgtccgtcttgatcgcgtcgtgcatcgaaggtgccgaacccgatgaacgactgctgcccgccgacctgttcgacgaaacgtttcgctccggggagctatgtcccggcgaggcatgcgtcggatgcgagcatgcccgcggaaccgggagcagctggtttctcgtatgcgaacggaatccgtcctaactcgagcggcgaggtcgtaccgacggcgtcggacacgaagcaagatcgttcttatttctccgcataatcagtgcgaatcatataaaataccattggttgtctacgccttaccgcgcctgcgcgcgcgatgcaggcagcagtttgtcagtgcaagcgggctttcgagcccacgaagcgaaagggggatacggtgagcaacctgctacgattaatcggacgacgcctcatagcgttgccgatcatgatcttcggtgtcaccatcctcgtcttcttcatcatggcactctctcctatcgaccaagcgtattcggtccttggcgagaacgccactgaagcccaagccgagcagtatcgcgaggagcacggattgaacgatcccatcctcgtgcaatacggtaacttcatcgtcggcctcgtacaaggcgacctcggcacctacggcgcgaacaacgcctcggtggccgatcgcatcggcgaagctctgcccgtcacgttgcagttgacgttcttcggcctcatcatcggcgtggtcatcgcagtgatcctcggcgtgatctcggccttgtatcgggatcgatggcccgaccagatcatccgcgtgttctccatcgcctgcatcgccacgccgtcgttctggctggcggtgctcatgattttgctgttctcctcgatgctgcacgtgctgcccgcctccggcccgctgccctcgctgacggccgatccgggcggttggctggcccgcatggccatgcccgccatcgcgctgggcgttcccgtggccggccagctgacgcgcgtcatccgcacgtccatggtggaagagctggacaaggactacgtgcgcaccgcgctgggcgccggcattccgaagcgcgtcgtggtggcccgcaacgtgctgcgcaacgcgctgatcacgcccgtgacggtgctcggcctgcgcatcggctacctcatcggcggcgccgtggtcatcgaggtcatcttcaacctccctggcatgggcatggccatcctctcgggcatccagtccagctacacgatgctcgtgcagggcgtcgtgctgtgcgtggccatcaccttcatcatcatcaacatcatcgtggatatgctttatatcctgatcgatccgcgaatcaggacggtgtagcaacatggtcaaacttcgaggaaacctcactgataagatggaagccaatcccggcaaggtgcatttccgccggtggaaggccatgagcatcggatcgcgcatctcgctcgtcgtgctcatcctgatcgtcatgatcgccgtgttcgccaacatcctggcgccgcacaacccgcttgagatcttcacggcacgccaagcccccgatgcccagttcctgttcggcaccgacgacaagggccgcgacgtgctgtcgcgtatgatgtacggcgcgcgctactcgctgatcatcggcctgggcgccaccgccttcgccctcgtgtgcggctccatcatcggcgccgtcgccgccgtggcgcgcaaatgggtgtccgaggtcatcatgcgcatcctggacgtcatcatgtccttccccggtatcgcgctggccgccacgttcgtgctcgtgttcggcaactcggtgccctcgctcatcttcgcgatcggctttttgtacatcccgcagatcgcccgcatcgtgcgcgccaacgtggtgagcgagtacaatcaggattacgtgcgcgccgtcgtcgtttccggcgcccgcgccccctggatcctcgtgaagcacgtcatccgcaactgcatcgccccggtcatggtgttcaccatcgtgctggtggccgacgccatcgtgttcgaagcgtcgctgtcgttcatctcggccggcattcccgagcccacgcccacgtggggcaacatcctgtccgacgcccgcggcggcgtgcttgccggtcgttggtggcaggcgctgttcccgggtctggccatcatgatcaccgtgctgtgcctgaacatcctgtccgagggcatcaccgatgccatggctgccgcgcccaaggccccggtcaaggccgatgacgccgccgtccgcgcgaaccgcgaggccgacaagctcgtggccgaccccacgctggcatacgccgcccaggcggagatgctcgaacagcgcctcagcgagcttcaggcgattgagaagacgcgcaccgaccgcttcgaggcgcgcaccgacgtgccgcctattctggaagtgaaggatctgtgcatcaagttcccgcgccacggcgacgtgaacgtggtcgaccacgtgagcttcgtggtgcgcccgcgccagaccatgggtcttgtgggcgagtccggctgcggcaagtccatcacctcccttaccatcatggggctgctggatccgaaggcgaaggtgtccggcgagatcctctacgacggccagaacctgctgaacatggatcagaagcagatgaacgccttgcgcggtcgcgaaatcgccatgatctaccaggacgcgctctcttcgttgaacccgtccatgctgatcaaagcccaaatgaagcagctcacgaagcgcggaggaacccgcacggccgaggagctgctggagctggtaggactcgatccgaagcgcacgcttgactcctacccccacgaactgtccggcggccagcgccagcgcgtgctcatcgccatggcgctgacgcgcgatccgaagctcatcatcgccgacgagcccactacggctctcgacgtgaccgtgcagaagcaggtcatcgacctgttgaacaagctgcagaaggagctgggcttcgcgatggtgttcgtgagccacgacctggcgctcgtcgccgaggtggccaactccatcacggtcatgtacgccggccaggtggtggagcagggccccgtgtccgacatcctgtgccatcccgtgcacgaatacacccgcggtctcttgggttcggtgctgtccatcgaagccggcggaacgcgcctgcaccaggtgcccggcagcgtccccagcccgaaagacttccccgagggcgaccgcttcacgccgcgctccagccatcctgacaaggtgtcccagctgcgccccgtgctcaagcgcgtgtccgactccgaccactactacgccgagctgcccgacagcgagctcaagcgcctcggcatcaaaccgtacgtcccaggaggtgccatcatatgagcgagcaggaacgcgtgaacgcgggcgtccagcccgcaacgggagcgggcgaacccacccccatcatcttcctcgacgacatccgcgtgacgttcaaaacgcgcacgggctccatcctgcatccgaacaaagtgcaggccgtgcgcggcctcaccctcaagctcatgcccggcgaaaccttgggcatcgtgggcgaatccggctgcggcaagtccaccacggccaacgtgatgtgcggtttgcaacagcccacgtcgggcaaggtgttcttcaagggcgaggacgtgacgaagcgctcggctgcgcagcgccgtctcatcggccgcgtgatctcggtggtgttccaggatccggccacggcgctgaacgcgcgcatgagcgtgcacgaccagctgatggatccgctcgtggtgcacaaggtgggcgacaagacgtcccgcgagcgccgcgtgctcgacctcatcgagatggtgggcctgccgaactccgtgctggatgccctgccgggccagctgtccggcggccagcgccagcgcgtggccatcgcgcgcgccctgtcgcttgagcccgacgccatcattgccgacgagcccaccagcgccctcgacgtgtcggtgcgcgcgcagattttgaacctgctgatggatctcaagcgcgacttgggcctgtccatggtgttcatcagccacgacatccagacggtgcgctacatttccgaccagatcatcgtgatgaacgccggagaggccgtggagcgcggcgcggcgaaggacgtgttcgagcacccgaaagacgcctacaccaagctgcttctgggagcggctccgtcgcttctgcatcccgaattgggcaagtaagcttacgacgtttcccctgcgccctcggttgaaccgggggcgctttttatgtggcgacctgccctcttgcgttgacgcttacgctgagggagtttacccttttaccgtttaccgacgaacagagagaggcttgctcctatgactgattcaccgtttcgcggcgtcattccccccgtcgtcattccgctgaccgagaagcgccagctcgacctcgaggcgctcgagcgctccatcaaccgcatgatcgacgcgggcgtcgacggtctgttcttcctgggatcctcgggcgaggttgccttcctcaccgacgcgcagcgctaccacgttctgcaagaggccatcgccatggtgcacggccgcgtaccggtgctcacgggcatcatcgacatggaaaccatgcgcgtggtcgaccaggccaagcgcgcgacgggctacggcgtggacgccctcgtggcaaccgcccccttctacgccctcggcggtcccaaagaggtggaacgccacttccgcgccatccgcgagcacaccgacctgccgctgtttgcctacgacctgcccgcttgcgtgcacacgaagctcgatcccacgatgctcgtgcgcctcggcgaggacggcgtgctgcagggcgtgaaggactcttcgggcgacgacgtgtcgttccgctggctgtgcctgcagaacgaggacgccggccacccgctgcaagtgctgaccggccacgaggtggtcgtggacggcgcctacctgggcggtgccgacggctcggttccgggtctggcgaacatcgatccggcaagctacgtggagcagtggcgcgccgcgcaagccggcgactgggagcgcgtgcgcgagatccagaatcacctcgcacgcctcatgtacgtcacgcgcgaggtgaaggccaccgtgggcttcggcgcgggcgtgggcgcgttcaagacggcgctgtggcagatgggcgtgttcaacacgaaccagatgcgcgagcccgtgtgcgcgctcgaaggcgaggacgtggagcagatcgtcgccgtgctgaagcgcgcgggactcatggacgccgacgcgccgatccgccaggcgcactgggatgcgtgccccgtctcgcccggcgctccggcttgcaagtagcgtgagcgccgcatgagcgtcgaacatccatgcacgattgccgccttcgacgtgggcggcacgaagatggcgggtgcgctcgtgcgctattccgccgccgatgcggcgccgacggtggacgccctgcgcagcgttcccacggaagcccagcgcggcggcagcgccgtgctggacaccctggcctcgctcgtggccgacgtggtagccgatgccgaagacgacgttgtcggcatcggcgtggggacggccgggctcgtggacgtgcgcacgggcggcatcgcgttcgccaacgagctcatgcccggctggaccggtcagcccgtagccgagcgtctgagcgcgtcgctcggccttcccgtggccgtgctcaacgacgtgaaggctcatgcgctcggcgaagctcgttggggcgctgcccgcggcgctcaaacctgcttcgttatcgcagcgggcaccgggctcggcggcggcatcgtggcgaacggccgcgtgctgctaggcgcgcacgggttcgcaggcgagctggggcgaacgccctgccccgatgcgctgggcacgccgcgcgcctgcggcaccgccagcgagcttgaatccatcgcggccggcagcggaatcgaagcccgttacgtcgcagcaggaggcgaacgccttgcgggagacgagatagccaggcgcgccgcagacggcgaggagctggcacgccgcatcattctggaggcgggcgcggtgctcggcgaagccatcgcaacctggacggatctgctggatccggaacttgtcgtgctctcaggctcggtatgcaacgccggaaaagcctggcgagccgccctgcaagaaggcttcgagcgacaggcgccttccgtgatgcacggcctgcccatcgtcgatgccgcgctcggcagccgagccccgctcatcggagccgccgaatacctgctcgataccctgaaaggacgatcatgaccgatcccctgatttcctccctgcaaggcaagctcatcgtcagctgccaggcctacgtgggcgagccgatgcgccaccccgaaaccatggcgcaggttgccctgtccgccgaacgcggcggcgcagccgctatccgctgccaaggccttgccgacatcgccgccatcaaaggccaggtggaaatccccgtcatcggcctttggaaagaggggcacgacggcgtctacatcacgccgacgctgcgccacgcgcgcgcctgcatcgccgccggctccgacgtggtggccatcgatgccacggcacgcccccgccccgacggtcgcaccttcgaggagaccgtggaggctttgcgcggtgaaacgctgatcatggccgactgctcctgcatggacgacgtgcaacgggcgctcgaagccggtgcggacatcgtgtccaccaccctggcgggctacgtgcccggcggccgcgagaaaaccgccggccccgacctcgagttcctgcgcgaggccgtcgccgcagcgggcgacgtgcccgtgttctgcgagggtcgcatccacacgctcgccgatgcgcaggcggccatggaggcgggagccttcgccatcgtggtggggacggccatcacccacccgcagtccatcacttcctggttcgccgacgccatcggctaggacgcaccgaatccgatgcgcgaagccctggaggggatcatccccctccagggcttttttcatgcccgtcagctcacgtgcgcctcggcggtgacacgcgcctccggatcgtccagaaccgagcggtcgaggccgcccgcaacatgcgaggctgtaatgcccgccaccatggagtcgctgacgttgagggcggtgcgacccatgtcgatgagcggctccacggatgcgaggacggccaccacctcgataggaagccccatcgtccccaacacgatgagcgaggcgaacgtcgctcccccgcccactcctgccacaccgaacgagctgatggccaccacggcgatgagcggcacgaagaacgtaggagacagcacgtcgatgcctacggtaggcgccacgatggtggccagcatcgccgggtacacgcccgcgcacccgttctgcccgatagacatgccgaagcttgccgcgaggttcgccgacgcgctgtccacgcccagggctttatgctgcgtctcgatgttgagcggcagcgcgcccgcgctcgaacgcgatacgaacgcgaagctgagcacgggaaacgccttcttgaagtaggtcgccggattcacgcggttcgccagcaagatgagacaatgcacgcacagcaccgccagcaacgcgccgtaagacacgagcacgaactttcccagtccgaggatggcgcggtaatcgctcgcggccatcaccttcgcgatgagcgcgaggataccgtacggggtgagccctaacaccatggccactatccgcatgacgatgccgtacaggctgtcgatgaagctcttgaagaagtctgcctggtcaacgtctttatcgcgcaacctgatatatgcgacgccgaggatggccgagaagatgacgaccgcgatggtggaggtggatcgggcaccagcgaggtcggcgaaggggttcgtcgggatgaacgagaggatttcctgcggcagcgtaaggctggcagcctcgctctgctgggaggcgagcgacgaaagctcggcggcatcgggggtcgcggcatcgaggaagcccgcatgcgcaagcccggtcagaaccgtagcaccccagcctagcacggccgcaacggtcaccgtgcccagcagcacggccaacaccgcgaaggcgatgcgcccgaagtgctcggtgacctccgcgcgcgtgaacgccccgacgatggccacgaacacgagcggcatgacgagcatcttcaacaagccgatataaccctgtcccacgatggatatccagtcgagcgccgtcgtggcagcatccccgtcgcggccgagcaacagctggattcccaaacctagcaggacgcccagcccgagcgcggtgaacaccctcgccgtgaagcttaggcccttcgatcgcatgatcttgagcacgacgagcatggcggcgaacaccgccaagatacctgcgacgggcaccagcacctccatcgacataggcaacgcccttcctcgtttatccgacgaaaaaagtagagtataggacgagcatgccaagaagaaaccggaaagccgtcaaagagaatgaagcgtcaccgaacggtagcgccgccggctgccgccccccctaaaaaacggcaaagggcgaagggctctgcacagagcggccgagagcgtcggtcgcctccgcacggaacccttcgccccgctgccgagccctcgcccggcgcgatgaacgcagaaagctaccccagcagctcgcctcgcaggatcacgtggcgcacgcggaggttctcatcgagcaccacggcgtcggcgatcttgccgacctcgatgctgccgcgctccccttccagccccaacgcgcgggcaggattggcgctggcggcccgaacggctgcatccagcgggatgcccatgtcgcgtacggcgacgcgcacacacgccatgaggtcggtggccgagcccgcgatagtgccgctgcgcagcgtggcgacgttgccccgcacggtgacatcctggccgcccagcgagtactcgccgtcgtcgaggcccgtcgccatcatcgagtcgctgataaggatgaccctatcggctccgaaagcggcgaacaggagacgcatcatggacggatggatatgcaccccgtcggcgataagctcgggcatcacctccgaatggtcgaacgccgcgccgatggggccgggcttgcggtggtgcagcggcggcatggcgttgcacaggtgcgtcatctgccgagcgccggcttcgatggccgcgcacgcggtatcgtagtcggcctgcgtatgcgcgatggacacgcgcacgtcggacgacaccgagcggatgaaatcgagtgcgccgtccacctcgggcgccacgtcgaccaatttgatgagattgcccgaacgttcctgcaagcgacggaacatcgcctcgtcgggcagatggaggtaggcagggttctgcgcgccgatgttgccgggcgagatgtagggaccctccatgttgatgcccacgagcgccgccccgtcgcgcttcgcctcgtaggaggccgcggcatccatgatgggagccagcacgtcttcgggataggtcatcgtggccgggcagatggccgtcacgccgcacgaggcctcgtgccgcgcgatggcgtcgatggcctcttcggtgccgtcgcagaagtcgtgccccacgcatccatggaaatgcaggtcgatgaggcccggaacgacgtagcatcccgacgcgtcgagcacctgaccgtcagccgccgtcgccgcagtgccctgcgggtcgacagccgcgaagcgctcgccttcgatgacgatgtcggcggacgcgaatcccgcgcccgtcagaaccgagccgccccttacttgcacagcgcacccgctgccggatcgacaatgacggtggcgtcgggatggaactgcaggatggacgccggcacttcgggcgtgaccgggccgaagaacgccttcttcacgatctcggccttgtgggaaccctccaccaccacgagcacgctgcgcgcggccatgatggtgccgatgcccatggtgtacgcctggcgcggcacgtcttcaacgcggtcgaacaggcggctgttcgcctggatggtgctctcggtgagatccacgcagtgcgtggccttcgggaacgtgtcctcgggctcgttgaagccgatgtgcccgttcgggccgaggccgagcagctgcaaatcgatgccgcccgcctcttcgatggcctgttcgtagactgcgcacacggcctcggcatcggggttcgagccctcgggcacatgcgtgcgtgcctgatcgatgtccacatgatcgaacaggtgcttcttcatgaagtagcggtagctctgatcgtgctcgggatcgaggccgcgatactcgtccaggttgaacgtggtcacgtcggcgaagctgatcttgccctgcgcgcaatcgtcaacgaggcacgcgtacaagccgatgggcgtcgtgcccgtggccagccccagcacgcacgacgggtcggcctcgacgaacgacgcgatgcggtcggcggcgcgacggctcatatcctcggtgctctcggcgatgatgaattccatggaacctctcttctctcggatcgaacggatgcggatacggatacggatacggatctatgtccagaactgcgcggtttcgatgatgtcgcggtacgcccacggatacacgtcggagtaccagcccgtctcgggcacgaagcacagaagcgcgctgtacagcaccgacacggccaccagcacgagcagcaccttcatgagcaggttctgcacggtcgaaccgggctgcaggttctcgttcacgataaacacgagcagcaccaccgcggccaagaacatgaagctgaagtcggcgaagtatcgttgcaggatgccggccatctccgcatcggccagcgccacgatgacgccgcccagcagcagcacgacgatgacgcccgcgatggtgcgcgtggagcgctggctcatgcgcagctgcaggacgcgcttcgcgaacggcagcacccacagcaccggcaggcacgcgaagatgccgccgaaggtgacttccttgatggtctgccccatgtacgtggtatcgaacggcgccggctgcaaatacgggaacacgcccgttgcgctgggcggttgcaggaagtaagcgaacagcgccggggccaaacgcccgatgttccacccgcgcttcgtcatgtcgttcaccgtgaggttgtagttcgccccgaagtccgtgaacgagccgaagcgcgcatggttgtacgccatcaggccggccgccaccacgaggtagggcgcgatgaggcaggcgaactcgcgtgcgccacgcggggtgagcagccggcgcttggtgatgtacgcgcgccagaacaacggaaacgccaccaacgacagcaccagcagctgcgggcggcatcccgcgaccagcgccatgcacagcgatcccgcaaggtaccacttctcgggtcccgccgaagcgcgccccttcatccagaagtacaggccccacaccgagaacgccaggcccagtgcgatgggcagcgagtagaacgtcgggaacttcagcaggtacagcacgccgcagcacatgaccagcggtatctgcagcaacaggtacaaccccaagctcacccgtttgaagtggtagcgcgcgaaccggtccaacagcgccgagcatcccaacacgaacgccacgacggcgatcagcacgccgatggccgtggggaaattcgcgcccgtcagcaagtagaacggcaggtagaacaatatgaccggcaccacgccgaagtacacgtagtagtgcccgttataatacgccacgtcgaaaagatagggctctcccgtctccttctgcatctcgtcgcgcgcgcccttgtcgtaggggtcgttggagtcttgcagccactgcggcggctcctcctccaggtacagctggccgtgagccatggccttcgccaattccgcgtactgctgcgcgttgtcaccgcccacctcgaatacgttgaccaggctcttgccgtcccacgagccgctgttgtagctttgcgtggccacgcccacgagattcgatcccaggaacaggaacgagcccagcagacacacctcgatagccaccgttgcgacgatggcggccttcgacttgcgcggctcgctgacgatgccgatgcggtagatggccgagcccggacggaacgcgaacgccaacgccagcaggcccatgcagacgaagaagcgcgtcgtgttgaagtcgaacgggtgatgcgcgttgaggacgatgtcgctcagcttgatgggatagctcacgtcgtcgcccgcgatctcgatacgcaggttcttcacgaggcccgtcgtgttgaggttgatgtactcgctctgatcgctgaacgtggacacccccaccggtggcacgcctaccgtgtactccgtggagtcgaagtacgtatggtgcgcgtcgtcagtgaactggatcttcaccgtcagatcctgcgcaggctgccggtagtcgaagttcagccagatgttgtgcacctcggtgttgaggttcgagaactccagcacgtggttcaccgcggtcaccttgtactggtcgtcaacggtctcctgcaaggtgagcttgtcgttcagcgagatggtgttgtagttcgccgacgtgaagtagttgatgttgaacaggaacgtctcgagcagaagcgagatcagtacgatggcaagcgcgctcttgatcaggtgaaccgccgccaagcggtgcctgctcatgaagccgttgtaggcataggctatgttctggcgtacggtcggcatattggtatggaattatagatgaaaaaaggcgggcgaggcagctcaagccccgtccgccttcaagattgcgtgcaaaaagcgcgcggacgcgctttacagaccaagcgcctgcttcacgtcggcgtacaccacgttcggatcgcgatcgccgtcgatggagacgagcaggtcgcagccgcgatagtagtcgatcagcggagccgtggacttctcgtacacgtcgaggcggttgcgcaccgtggcctcgttgtcgtcgtcgcgctggtacatctcgccaccgcacttggggcaggtctcgtcggcggcggtgccgatgtagttgcagtcgcggcacatgcgacgcgaggtgaggcgcttgacgatgacctcgggatccacgtccacgagcagcgccgcgtccagcgggcgtcccagcttggacagctcggcgtcgagcgcgaccgcctgggcggacgtgcgcgggaagccgtcgaggatgaagcccttctcggtgtccggatcctgcaggcgctcggtgaccaggccgatgatgacatcgtcgggcacgaggtcgcccgcgtccatgaaagacttcgccttctgccccagcggcgtgccggcctttacggcagcgcgcagcatgtcgcccgtggagatgtgcggcgtgccgaactcttcaaccagcttggccgcctgcgtacccttaccagcacccggcgcccctaacaacacgatattcatgatggttcaatcctttcgacatacaatcgatgcgccgtattgtatcaaagccctacgccgtacgcgcgcatttcaacagaaagacagccagagcgaacgaatgcgccccgaagggcgcataataaactcgcaggtcgttcgtaaagacagcgagaagccccgaggcgccttgcattgccgtgaaagtccgaggaagcgtacttcggtacgcgacgaggacttggagcggcaaggcaaggcgcctcggggcttcgcagcggcggcttgttccgctggccgcaaggccagcggaacccattacttgaagaaaccttcgtagttgtgcatcttcagctggctttccaccttgttcatggtgtcgagggccacgccgatcatgatgaggatcgaagtgccgccgaacgcctggatgagcgtattgccggtgaagtagaagatgatcgtcggcaccaccgcgatggcggcgatgaagatgccgccgggcagcgtgacgcgatgcagcacgttcttgatataggtcaccgtcgccgtgcccggacgcacaccgggaatgaagccgccctgcttgcgcaggttgtcggccgtctcctccggattgaacaccatggaggtgtagaagtacgcgaagaacacgatgagcagcacggtgaggatccagttgacccagccggtggagatggcgtcggccaccgccgtcagccagcccacgttgaacagggccgccagctgcgccgggaagtagatcaggcagcttgcgaagatgatcgggatgacgcccgccgcattcaccttgaggggaatgtaggtggactggccgcccatcatcttgcgaccctgcacgcgcttggcatagttcaccgggatgcggcgctgcgcacgctccacgaagatgatcgcgggaatgcaggcaagcaccacaagcagggtgaccaccgtaatcgcgacgcccatagtggtatcggccgtgaggttcatcgacgagaagatggcgctcggcacgcgcgacacgatgctcacgaagatgatgagcgacatgccgttgccgatgccgcgctgcgtgataagctcgcccatccacatgatgaacgcagtgcccgccacgagcgtgaacacgacgaggatgtcggtgaggatctccggcacctccgtggagaacaccacgccgtactgcggcgacttgaacagcagcaggtagccgatggcattgatcagacccagacccaacgtcaggtaacgcgtgatctgcgtgatcttgcgacgacccgtctcgccttccttagcccagcgcccgatggcggggatgacgccctgcatcagctgcatgatgatcgatgccgtgatgtagggcatgatgcccagcgagaaaaccgagaagttcgacaacgcaccgcccgtgaacaggtcgagcatggtcatggacacgcccgagtcctggaacgagttcgcgaactcgttgaacgggatgccgggcaccggcacgtacgcgccgaaacgatacagcgcgaggatagccagagtgaacaagatcttcttgcgcagctccggtaccttgaatgcatcgatgatcgagcttagcaaggctcttcgacctttcctccggctgcttcgatcttcgccttggcggaagcagacaccttatccacctgcacggtgagagccttggtgatctcgccgtcgcccagcaccttcacgagcgcgtcggcatgcttgatgatgcccttggccttgaggctttcgccgttcaccacgtcgccggcctcgaaggtctcctcgagacgcttcacgttgacgggcaggtactccacgtggttgatgttcttgaagcccgggagcttcggcaggcgacgagcgagcggcgtctgaccgccctcgaagcctgcacccttgccgccgccagcacgcgacttctggccgttcataccgcgaccggacgtcttgcccgtgcccgacgcgggaccgcgacccacgcgcttgcggggcttgcgcgaaccttcagccggcttaagatccttgagttccatgttagtttctccttctttcgctgtccgggacccttcccggcgctggcagctcgccgccagcaaacttccgtaaatcgaccatcggcgtgccgttgcggcacgccgacgaatcattatatcctacctgccaagtaccacgaagattagatctcttcgaccttgaccaagtgcttcaccttgaagatcatgccgcggacggactcgttgtccacctgctccacggagcggttgatcttgccgaggccaagcgcgcgcagggtcttgccctggtcttccttgtagccgatggagcttttcacctgggtgatgcgcagggtcttctttgcgtcagccattagttcttctccttccagccgtagatcttggagacggacatgccgcgacgctcggaaacctgctcggggctctccatgttcttgaggccctcggcggtggccttgaccacgttcatcacgttgtcggtgccgagcgacttggcgaagcagtcggtgacgcccgccagctccatgaccgcacgagccgcgccgccggcgataacgccggtaccgggcgtagccggcttgatgagcacgcgaccggcgccgtactcgccgatgatctcgtgcggcagcgtcttctcggccgtcagcggcacgctgaacatgttcttcttcgcgtcctcgacgcccttcttgatggcgatgggcacttcctgggacttgcccatgcccacgccgacgcgaccgttgccgtcgccgaccaccacgagcgcggtgagcgcgaagcggcggccgcccttgacaaccttcgacacgcggttgatgtagacgacgcgctcctgaagctcggggaccgcggcgttgtcttgtttgttacgagccatagaccttaaccccttctagaatttcaagcctgcttcgcgagcggcatcggccaaagccttgatgcgcccgtgatacaggttgccgccacggtcgaacacgacttccgtgacaccggattcctgcgccttcttgcccacgatcgcgcccagggcggcagcgccctcgacggtcgcgccgctcttgcccgtggccttgaaatcggggccgagcgtggaaacgccgcagatcgtcttgccggcgacgtcgtcgatcacctgcacgtacatgttggagttgctgcgcgtgacgcacacgcggggacgagccgccgtaccggcgatctttccgcgaacgcgacgatggcgacgagccagcgcagcctgctttttctgaagcttgttcatgataatcccttcgatctcaatcgttcgcggctcgcgcctagtccttgccggccttgccgaccttgcggcggacatgctcgccctcatagcgaatgcccttgcccttgtagggctccggcttgcgccacttgcggatgttcgcggcaacctggccgacctgctccttggaaggaccgctcacgatgatctcggtctggctgggcacctcgaacgtgatgttctcgggagcctccaccagcacgggatgggagaagccgagctgcatctcaagatccttgcccttgagcgcggcacggtagccgacgcccacgagctgcagcttcttggagaagccggcagacacgccctccaccatgttggcgatgagcgtgcgcacgaggccgtggtaggccttcgcttcgcgggagtcgttcggacgctcgacgatgatgtcgtcgccctcccgcttgatggtcatgatctcggggaaggtgcgggtcagttcgcccttcgcccctttcgccgtcaccgtcgtgccgtcgatggtcacatcgactccggcaggaacggtcacgggcagcttgccaatacgagacatatctatccctccctttcctaccagatgtaggcgatgacttcgccgccaacgccctttttacgggcatcgcgatcggtcataacgccgttgctcgtcgaaacgatagccgtgccgaggccaccgagcacgcggggcagctcgtccttgcccgcgtagatgcgcaggccgggcttcgagatgcgcttgatgccgcggatcgtcttggccttcttgtcaccgtacttcaacgtgatctcgagcgtagcgcgcggctcgccctcgatgacgtcgtagccctgaacatagccctcttcctgcatgatgcgggctatctcgacaagtttcttgctggacggcatggacaccgtcggcttgccggcagagttagcgttacgcacgcgcgtaagcatatctgcaatggggtcggtcatggtcatagtgattttctcctttggtccgtgatgagcctgtcgattcggttcgtcagcgcccgtaacgcctccgcctgaaccgtggcacacccgagcgtaatcgtcgtgtggcttaccacgaagctttggtcacgccgggcagttcgcctttgttggccaactcgcgcaagcagacgcggcacaggccgaacttgcggtagtaggcgcggggacgtccgcagcgcgtgcagcggttgtgctgacgcgtcgagaacttcggctcgcgcttggccttggcgaccatcgatttcttagccatgcaaatccttctttcttatatccagcccgtccgatcgtccggacgggctcgagtgcacgtttcagcgcaggttgccttggggcagccttgggtgggacaacgcgggttattccttgtccttgaacgggaagcccagcgcgtcgagcagcgcgaaggcgctgtcgtcgtccggagccgtcgtcacgaacgtgatgtccatgccgcgcgtgcgatcgatcttgtcgtaatcgatctccgagaagataagctgctcggtgacgcccatggtgtagttgccgcggccgtcgaagctggtcggcgagatgccgcggaagtcgcgcacgcggggaagcgccgtggccagcagacggtcgaggaactcccacatgcggtcgccgcgcagcgtgaccttgcagccgatgggctggccttcgcgcacgtggaaaccagcgatggacttcttggcgcgcgtcacgcagggctgctggcccgtgatgatgcgcaggtcgcccatggcggcgtccagcagcttgtggtcggcagcggcggcgcccacgcccatgttcacgacgatcttctcaaggcgcggaaccttgttcacgttgtcgagggcgagatccttctcgagcttggccacgatctcgttggtgtacttttccttcaagcgaggagcagtcatgttttcctgtatcctttcgatgaattaaacgcaggatttccgaccctgcgtccccaaccggcctggccggagggggtcattgctcaaaggggcgcgccgccgaagcgccgcgccgccttcatgtgctagtcgatgtccttgccgcacttcttgcagacgcggaccttcttgccgttctcgtcgcgcttgttgctgacgcgcgtgggctgcttgcagctcgggcacaccagcatcacgttcgacacgtggatgggagcctccaccgaagagataccgccctgcgggttctgctgcgtggggcgaagagccttcttgacgatgttgaccttctccacgacgacgcgctgcttctgcggcagcgagcgcaggatcgtgccctctttgcccttgtccttgccggccaggaccttcaccttatcgccctttttgatgttcatgctgttcatttgcgcacacctccttagagcgtttcaggtgccagggacacgatcttcatgtacttcttgtcgcgcagctcgcgggcgacgggcccgaagatgcgcgtgccgcgcggggcgccgttcgtgtcgatcagaacggctgcgttctgatcgaacttgatgtagctgccgtcggcacgacgaacttccttcttcacgcgaacgaccacgcagcggacgacgtcgcccttcttcacgttggtgttcggcgcggcttctttaacgctgcagatgatgacatcgcccagtcccgcgtaacggcgcttagagccgcccaggaccttgatgcactgcaccttgcgagcgccggagttatcggccactgcgagcatggtttgcatctgaatcattgcttcaacctaactttcatctcgatagtctttcgcgacgagcgcgcaagactactgggccttctcgacgatcttcacgaggcgccagcgcttcatcttcgacagcggacgcgtttccatgatctgaacggtgtcgccgaggccggcttcgttgttctcgtcatgggcatggaacttcttcgtcgtcgtcatcatcttgccgtacacggggtgcggcttgcgctccttgacttgcacgacgcaggtcttgtcgttgacggcgcttaccacgacgccctgacggaccttgcgggagttacgttcttcgctcatgtgtatccaaccttcctagccgacgggctatgcgctcagctcgcgggcgcgcatctcggtctgaatacgcgcgatgtcctttttgacctgcttcacgcgggcggtgttgtcaagctggctcgtagccatctggaagcgcaggttgaaaagctccgcgcgcgcttccttgagtttcgcctgcaaatcgtcggcagacagctcacggatctctgctgctttcatttattcctgcccttccgtttcacgagaaacaatcttgcacttgatgggcaacttgttgatggcgaggcggagcgcttccttggcgacggcctcgtcgacgccaccgatctcgaacatgatgcggccgggcttgacgaccgcgacccatgcctcggggttgcccttaccggaacccatgcgagtctcggcaggcttcttcgtgatgggcttgtccgggaagatcgtgatccacaccttgccgccacgcttcatgtagcgggtcatggcgatacgggctgcctcgatctggcggttggtgatccaagcggcttcgagcgcctggatgccgtattcgccgtggttcaaccgggtgccgcctttggccttgcccttcatggaaccacgctgcaccttgcggtgcttcacgcgcttaggtacgagcattactttgccctcctatcgttacgatcgttgcgacggggacggctggggcgagagctgccctcgagcgccggctggggagccttctggccggggagcacttcgccgtggtacacccacacctgcacgccgatggagcccatcgtcgtagcagccgtggcgaaaccgtagtcgatcttggcacgcagcgtgtgcagcggcacgcgaccttcgcgataccactcgcgacggctcatctcggcaccgccgagacggccggagcactgaatgcggatgcccttggcgccgctcttacgggcggactggacggccttgcgcatcgcacggcggaacgcaacgcgtccctcgagctgctcggcaacggactgcgcgatgagcgcagcatcgagctcggggcgcttgacctcgacgacctcgatggacaccgggccgttggcgaccttctcgagcttcttgcgcagcgagtcgatctcggcgcccttcttgccgatgacgacgcccggacgggcggtggtcacgatgatcttgatcttgtcgccagcgcgctcgatctcgatcttggagacggcggcacgggcgagctgcttgtccaaaaacttcctgatggccaagtcgtttgccaggttcttggcgtaatccttgtcggcgtaccagcggctacgccattcctcggtgatgccgagacggaacccggtggggcttactttctgacccatgcggcttatgcctcctctcgcggtgcaacgatgatggtgatgtggctcgtgcgcttgcggatgcgcgaagcggagcccttggcgcgcggacggatgcgcttgagcgtggggccttcgtcggcgaaggcggccttcacgatgagcgtttccgggcgcacgtggtgctggttctcggcgttggccacagcggagttcagcgtcttggcgacaacctcggcgatggcgcggtcggagaactgcaggatctcgcgagcggcgggcacggacttgccacgaatcagatcgatgacgatacgcgccttacggggcgaaacgcggacatagcgtgcaattgctttagcttccattgttttcaccccttcttatctcttcttgcccttgtcggcggaatgacccttaaaggtgcgggtcggggcgaattcgcccagcttgtggccgaccatggattccgtaacgtataccggcacgtgcttgcggccatcgtgcacggcgatggtgtgacccaccatttccgggaagatggtgctcgagcgcgaccaggtcttcacgacgttcttctcgcccgccgcattcatcttctcgatacgatcaagaaggcgcggttcaacgaaaggacccttcttcaaacttctactcactattactccttaacgctttgcgctacttcttgcgacggcggatgatcaagcggctcgaagccttcttgggattgcgggtgcgatggcccttcgtgggaacgccccacggggtgaccgggtgacgaccagcggacttgttcttgccctcgccgccgccgtgcgggtggtcgaccgggttcatgacggtaccgcgaacgctgggacggatgcccttccaacggttgcgaccggccttgccgatcttgatgttggagtgctcggcgttaccgacctcgcccaccgtcgcgcggcacgtgatgagcacgcggcgcatttcggaggaaggcatgcgcaggatggcgtagtcgccctccttgcccatgagctggatgctggtgccggcggaacgggcgatagcggcgcccttgcccggctgcagctccacggcgtggatgagcgtaccgacggggatgttggccaacggcagggcgttgcccggcttgatgtcggcctcgacaccgctcatgacggtatcgcccacgcggagacccttcggatgaaggatgtagcgcttctcgccgtcgacgtagtgcaacagggcgatgcgggcgctgcggttcgggtcgtactcgatggtcgcgaccttcgcggggacgccgtccttgttgcgcttgaagtcgatgatgcggtaacggcgcttgttaccgccgccctgatggcgggtggtgatgcggccgttgttgttgcgtcctgccttgttggacagcggcgcaagcagcgacttctccggcgtcgacgtcgtgatctcggcgaagtccgagaccgtttggaagcgtcggccggggctggtcggcttgtactgtttgactcccattgctttcctttctgcggattctcgctcgcacgcctctccgtacaccgagaatccttcgtctcttcgtggctccgattgccgccgatgtgccgcagggaggctgggcacgtgcgactccggttgccacgcgtccgggtgtatccatctaagtccagacgcaaccgagaattatacgcagaaaacgctttgtattcaagaatcgattttttagacacaacctgcgcacaatccgcagagcattccagaccgctgagagagcgacgaaaaacgcgagcgacaaggacaaagccttgtcgctcgcaaacgattacgaaggatggccaacaggggcagtttcctgcagcatgaagccgaccagaacggattactgccgctccgccagctgctccacgttcacgacggcatgatcgagcagccactggttcgccttcatgcgctcggcggcctcgcgcagagcgaagccgcggccgttctcctgcatctcgcgcttcacggcgtccgggttctgcgggttcatcgaacggcaggcggcgtcgatgtcctcgtcggtgagggtcatcttctcgtgacggaacagcgcgtccagcgcgtagccctgcacgagcatctcgcgggtctgcatcatcatgatcatgccgaactgctgctcgccgccctggctttgcacgaactgctcgaaggggatgccctgctgctgcagctggccgcgcaggttggacacgagcgtctgctgcatggcctcgtacacctcgtcctgaatgcggccctcgaaacgcttggccagctcggatgccgcaacctgcagcttgtacgcctcgtactgggcgcgacggtcggccgtcaggcgatcggttatgccgccgcgcagagcggccgcatcgcggtacatgggcaggttcttggccacccattcgtcatcgatggcggggacgacctttttctgcatctccttgacggtgacggtgcagtcgacggtgtcgcccttgtcgtcggcgttcatgccgggcaggtcgaaggagaacgacttcgtttcgcccacgttcatgccgatgagatgcttctcgaagtcctcgggcatgaggcccatgccggtgaggtacgtgcggccttcggtggacaggttgtccatcttctcgccgttctggaaggcttcgagcgccagcaggaagccgtcgcctttctccaccgggtgcggctcgtccgacacgaactccgcgtagctctcggcgatctgcgcgatctgctcctcgacctcggcctgctcgatctcgaaaggcggcacggtgatggacacgggctcgtaggacttcagctcatagtcgggcttcggcgtgacgcgaacctcgaacgagaaggtctggccgcgcttgagcggaccggcggccttcggaagagccgggaacgccggcgtgatgttgcgcttgtcgatggcgaacggcacgaggtactccacggcctgctgctgcacgatggcgtcgaggtccttgatgcccagctgcttctcgacggcctgctccacggacatgcccggcgtgggctgcacgcccatctgctgggcgaacctgtactgagccgccgtgagggcatggctgacctcggcggtggaggctacggcctccagcaggatgcgtccgtcgtcgagcttcttttcggttaccttcatgaagagtccccttctgtttcgatcgtcaagcgctcattgtagcgcattactcgttcgacttgaggctttccaccatgtcgatgcggcgcaatttgccgcgcatggccagcatcacgagcacggtgaacagcatggtcagcagaaacgccagcaggaagctggtcgggtgtatggcacggccgaacatgatctggtccacctcggccgtgaccacgacgaagccttccatccacacgcccagcacgagaccgaccgcgcagccgatggccgccaagaggaatatctcgcggaagatgtaagcgttcatctcacgcggcgtgaagccgagcaccttgagggtggcgatctcgcgcatgcgctcggtgatgttgatgttcgtgaggttgtacagcacgatgaacgcgagcgccgccgccgcggtgaccagcaccacgacaatcatgttcacgctcgacatcatgtcgcggtacgcgtcgatggtctcgtcgttgtacgccacggtcttcacgcctcctgcggccagaaggtcgttcgagaactgcacgcgcaagtcggggtcggacgtggtgacggccagcacggtgcggtagtcgggagccttgcccataagctgctcgtagagggcgggacccatataggcgtaatggtacacatagttctcgacgatgcccgtgaccgtggcctcgtaggacgtgccggtcgcgttgccgatggcatcctgctcggtcagcgtgacggcatcgcctgcgcgcacgcccaactccgccgccagcttctcggtgagcacgaggccgtcgtcgtccagcttcaccggatgatggccgacgcgggtgttcaaggccacgaagcggtcgaacgatgccggatcctcgggcacgaccagctccatgcgcttgtcttgctcgtccggcccgccggccagcatgttctgccgcatgaccagcgtatgcgcggtgacgagcgagccgtcgtcgagcaggtcgtcaatacgccgctgctcttcgcttgacaggtcgtccgccagcgtaacgacggcgttgtacttcgtgatctcgccgaactgcttgtcgattatatcgttgatggcgttggacaacccgagacccgtcagcaagagcgccgtgcagcccgcgatgccgatgaccgtcatgacgaagcgcttcttgtagcggaacaggttgcggaacgtcactttccacgagaacgagagatgccgccacagcggaccgatgcgttcgagtaatatgcgcttgcccgccttcggagtgcgcggcagcatgagctgcgccgggcgctcgcgcaaggtggcggcgacggcggcccaggtggcgaacagcgtgacgccgacgccgagcccggctgcaagcccggcgaacccaggatcgacgggcagcggcagcggcagctcgggcacgaagtatatgatgccgtaggccttcatgatgacggcgggcagcacttgggacagcgcgaggatgcctagaatgctgccgatcccgctggccgcggctgcgtatgcgaggtatttggaggcgatgcgcgtgcgacggtagccaagcgccttgaacgtgccgatgagggcacgctcctcctccaccatgcgcgtcatggtggtgagggccacgagagccgccacgaggaagaagatgaacgggaacaccgcggcgatgctgtccacgcggtcggcgtccgcctcgaagctggctgcaccgtagttcgccgtgcggtccatgaccagccattcggggcgctccagatcgtcgatctgcttctgggcgtcgtcgaggcgacgctcggcatccgccagctgcgcatcggcgtccgatttcttctgctcgtattcggcgaggccgctgtcgtagtcggcgcgaccttgttcgagctgggcgcggccgtcctgcagccgagcggcggcgtcatcgagctgctgctgagccgcggcgatctgcgcgtcggcttgcgagcgcgatgaggcgagatcggcgcgcgcctgatcaagcttccgggcgctcgcgtcgaactgagccttccccccttcataggcggcctgctgctgttcgagctcgaccttggaagagtccagggcgtcctgcttgccctggagttcggcgcgcgctgcctccagcttgggcttctgcacgttgacgagatcgtcgagggtggcctggacgagagccatctgcgcccggagatcctgctgttgcgctttgagggcgtcttgctcggcgcgcagttcggcgatcttctgcgcgtccttgtcgggatcgagctgcttgatctgctcctccagcgcgtcgatgcccttctggatccggtcgacgccggccgctgcgtcggcgacgccggcctgcgcccgagttatgcccgcgtcaagctcgtcggattgccgctcccaatcgccccacgccgccgcgagggcgtcggcaccctgttgccactgagcccgggccgcttggagttgccctgcggcatcatccaactgcgggcgctgcgcgtcgagctgcgcctgcccttcggctatctgccgttcggcatcgtccagctgcgcctgagcactcgcacgctggctcgccagctcggacgcgccgctgtcgtaggccgcctggccgtcggccagctcctgctcgcttgcggcgatcgtcgcggcggcatcgtcgagctggcgcttcgcatcgtccagttgcgactgcgcgtcggccctctcgccctcgtagtcggcgcgcttctcgtcgagctccttctgcgcatcggacttcagctggtcgacacgcgcctgctcgcgctcgggcgcaagcgccttgatgcgatccgccacttcgtctacgagccgctggtaggcgtcgctcgacgcgcgttcgttcgccgccccgcgcaccgtgaggtacgcctcggtatagggaagatcggccgagaagtcgctctcgggcacgtacatatactgttggatggagcccgaacccagcgtggtctcgcccatgctcgaagacgttgcgtagtacggagcgttcacaaagcccgtcaccgtgtacgtgcgcgtgacgagggtctggtccacgtcctgcacgccttcggtgatggtcagcgtgtcgccgacggcgatggcgtcgttctccacgaggttggccgacagcacgcactcccccgtcttctgcggccacgaaccccggacgaggaggggacggttcagatagtcggggtcgtcggaacgcgcatgcacgccgtcggaggtgtcgctcgtgcgcgctgcatcgggcagcgaatgcacgcgcgtggcgtactgctcgccgtcgatggaggccatgacgtcggtctcgcgcgcgggcatcacagcctcgactccctcgacgtggcgcagcgccgcgatgtcgtcgtcggtgaggccgagggtcgaaagcacgcggatgtccatgagcgacgtgccgtcgaagtactcgtcggccgccagcttcatatcgggcgcggtcatgcgcaggccggcgtagaagcccgtgcccagcgcgacgatggcggcgatagccaggaagcgcccgagcgagtgggtgatcgaacgcagggtctcagtgttgaacgcgcttttcacgacgcgccggctaccactcgatcgcctcggcggaaacaggcgcttcgttcacttcgacgcccgcaacgcgtccttcgcggatgtggatcacccggtcggcgatggcggtgaacgcggagttgtgcgtgatgagcaccaccgtcttgcccgtgtcgaagcacgtgtcctgcaacagcttcaggatggccttgcccgtgcggtaatcgagcgcgccggtgggctcgtcgcacagcaggagcttagggttcttagccagcgcacgggcgatggccacgcgctgctgctcgccgccggaaagctgcgccgggaagttgtccaggcgatggcccaggcccacctgcttgagcacggttcccgcatcgagcggatccttacagatctgactggcaagctccacgttctcaagcgccgtgaggttctgcacgagattgtagaactggaagacgaacccgatatcgtagcgacggtagtacgtgagctccttctcggagaatgcgctgatctcgcgaccgtcgagcatgatggttcccgacgagcaggcgtccatcccgcccaacatgttcaaaagcgtcgtcttgcccgcgcccgaggggcccacgaccacgacgagctcgccgcgttcgatgtcgaaggtcatgccgtcgacggcagccacctccacctcgcccatgcggtacaccttgagcacgtcgcgaaactccacgaacgccatgtcgcccttcttccgtcagcccgaataccggtttccctcaccatacacgaacccacatcccaacgccagcgacaacacgcctgccctgcgaacaaattccacggatccgatcaacggctcgcagcttgccggatgcaatgcgcaggttatggcaaaagtgcgagatttcttgttctttcaatccccctatgacctcaaggccgccagtcatggtatttctttgctcgaacgttatcttgatgggctgcgtcctggcaatacgaatccaagccgctccccctccctgcaggagcaaagcgtaatctcgctattctttcgaaaggctcgtcatgaatgagacggttctcatagtcgaagacgattcggatattatcgaaatcctgagcctctatctatgcggtagcgactaccaagtcgaaaccgctgcgaacggaaagctgggactcgagctgcttgagcgcaagtccccttccgtcatactcgtggatttgatgatgcccgaaatgaacgggtttgacttcatcaaggaagctcgcttagtttcgaacgcgcccatcatcatcatttcggcgcgcagtcagcccaccgacaagatgctcggcttggatttgggtgccgacgggtacatcacgaagccgttcgacccgatcgaagtgctggcctacattcgcgcggttctcagacgctgcaacgcattgtccgcaagcggcccaagcaacatttcaccggacggttcggtcgtgcgcatgggcgccatagaattcgacaaagagtccttgatcgttcggaagaacagcaacgtggtttcctttacggcctcggaattgaagatattcagcaaactgttctcctcgcccggccgcgtgtacacgaaggcgcaattgtatgaactgatcagcgcttcctcgcatggcggaggcgaggacagcatcatggttcacatatccaacatccgctctaagatagaagacgatcccaacaatccggcgcatatcgttacggttcgtggattgggatatcgttttgagggctgatgcgacatcggtgaagctgggggtggagtcgctgctttccagcttggcgtttcggtgcatgtcgatcgtgcttgtttatgcggtcttgatcatgggcctgttttcgactgtcggctacctcgcggactcgcgcctcaacagcgcgtttccttccatcgacgatctggaggaaaacagggtcgcgctggaaaacgactctttcaacgaattgagaaactcgataccgccatctgctcagatggtgatattcgatcagaacggaaaccgcctctatgccagcgatgacgatgtcgccaaatcgatcgacgccaacgacctggaaatcatcaacggaaccgaagaagatcaggtgttctacgaggttttgcagcgcttcgatgcccgctacggcaccgtgtatgaaataaacttatgcggaatgagcgggatcgggagttcgaagatagtcttatcctcatgcgtttgcaagcttgatggaacgatcgtcgaaggcgacctgttcgccggtcgagaatcgctgagcaagcgggagctttccctgataaacggggaattcagcgcaaacaaatctatccagaagctcgaatacgttaccgtcgacaatcagccccgcacccttgtttttatctcctcgaatgtgagcgaagcaacatacgatgagctgatcagccaaaacgggatgatttggctttcttctatccctgtcgcggttgccttcacggcaattgccgccgtggtgctcgtgagaatgatacgcagggcggcaaagccgctcgacgctgccattaccgcatgcaaggaaggcggcgaaagccccgacggcatgcatcgcgttccagctgagctggtgccgacatacgataattttctcgagctgatggaggagcttaaggccgcgcaaaacgacaagcagcgcatcgtttcggatatttcgcatgatctgaaaacgccgttgacggtgataagggggtatgcgcaggcatttgaggacggatgcgtgccgcccgaaaaagccggagagtatctgagggcaatgaaggaaaaaacggacgaagcctcccagctcatcgattcgctgtttctttacgccaaaacgaaccacccctcgtacatccctcagcttgtgcggatggacgtttgcgaagcggttcgtcgcattgcggtggaaatgcttccgactatcgaacagcgcgcctgccgccttgacgcggcaatccccgacgatcccatttgggtgcgcgccgacggctcgttgctggcgcgcgtgcttggcaacctgatcaacaatgcatgcgtgcataatcctggcggcgttaccgttcgattgacctgcaaacgcactgaaagcgaggcggtgatcgccgtagcggatgacggcgcgggaattcccgaatccatacgcgaccatgtgttcgaaccgtttgtgacaagcaatgacgcacgcgaatcgggcaagggcaccggcttggggctttccattgccaaacgtttcatagacttgcagggtggaacgattgccgtttcagctcagcccgaagaagacttcgaaaccgagatcgtcgtgactcttccgctggcatagcccctttcgttaagaaaccttaaggctgtcttcagcctaagcaaaggatggcttttcatagtgaaaagcgtatgtcctttgcttgaaggagagctatgaagaatcctctgatacgctgcgtcgcgctgcttgcgctgctgcttggccacatcggactggcgggatgcgccgcaacccaggaaaagcatgctgaaaacgattcgatcgacaacgaattggcggacgcgagatacgatgagcccgaagagcgcgttttggtctcagacgatcggagcaacggaaaagcgtcgaaggagatagtttgctggggcgacagcatgaccgaaggagccggtcgcgatccagccgtgatcgcgaccggcgacggcgtcttcgatgccagctatctgtcgtatcctgacgtacttcaaaaactgacgggtatgaccacctgcaatttcggcgtgtcgggcgcgacatccgaagagatcggcattatgcaaggagccatcgaggccgatgacgaggacgagcgcctcttcatcgatgaggaagtggccgagctggcaaaacagcatacgggaacgatactggtgctggaaatgggaagcaacggcggctgggatggcgattacgcaacgctcatagagcagtaccatgcgatcatcgaaaactccggatgcgagaacttcatcatcatcggcgacaccgacgaccccggaacttcgttcggcgatccaagtcaagaggctttcgagccgggcgagaccggccgtcaaaccgagtgggaggccacgctgaccgcagaattcggcgaccgctttatcaacatgcgccagtttctcatcgataacgggttggcgatcgcagggcttacgcccacccgagaagatgcagaagatgctgccgtaggctgcatatccctgcagctacgctcagactggacccatttgaattcttacggatactacgcaaaggcgcaggcggtgtaccagagaggcgttcaattgggctattggtaaacccaaagaaacctttagaaagcgtttaggaaacgaaaaggttgctctcttactgtggaacacgaggcaaatacgtaagagaggtttcccatgaaatccaagagcaatgtgctggagtatctggccgaggccgcgaagcggcggcccggcgatacggccgttgtcgacgagttcggcaactatacctacaagcagttgcaggacgatagcgcagcgtacggcgcagcgctatccgaatacgacgtggcaaatcggggcgtggtcatcatggtggaaaaatgctatgacacgcttgccatcatgctgggcacgctgttcgcatccggatattacgtgccggtcgatccatcggttccccccgtgcgacttgcgcacatcgtcgcggcattgggaagcccgctcttggtggccgacgaggaagccctgcggggccttcaactcgaagacgcgtgcgagatcgtttccttggaggagctgcatagccagcgcgccgggatacagcagcgcgacgcggtcgagccggcatcgctttcgatcgacccggcatacgttctgttcacctccggatcaacgggcgtccccaaaggcgtagttgtcagccatggagccatcatcagcttcatcgacgaattcgtttcggaattcgaattcgaccgcagcgatcggttcgcaaaccaagcgccattcgacttcgacgtgtccgtcaaagatattttcggaagcttggcggtgggagcgacgctcgtcatcgtgccacgccgcttgttcatgcagccgaaagccttggttgagtttctggacgagcagcgcgtgaccgtgatggtttgggcggtcgcggctttgtgcatggtgaacacatttcgcgcaattacaagcgattcgcttaccacggttcgaaaagtgctgttcagcggcgaggtaatgccacttgcccacttgaaatccctgcttgcgtctttgccggacgccgagttcgtcaacctgtacggcccaaccgagatcacctgcaactgcctgtaccatcgcgtcgaccgcgcgaaagacggcgccgccgagcttcccctgggaaaagcattcgggcactgcgaagtcctggcggtcgacgaggagggacggcgcatcgtcgagccgggccagaaaggcgagatcatcgtgcgaggaccctcgttggcgttgggatatatcggcaatcgagaagcgacggaaaaggcgtttgcgcccaatcccctcaattccctttacggcgagcgcgtgtaccgcacgggagacagcgcgatgctgacggacgagggcgatctggtcttttgcggtcgcaaagacaatcagatcaagtaccgagggcaccgaatcgagctggaagagatcgacaaggcgttcgaagggttctccgacgtcgacaggtgccgatgcgccttcgattccaaaaagaaccggctatgcgcgttctacgaaggaacggcttgcgagaaagagcttcccggtcgggcggcatcattgcttcccgctttcatgaggccgacgcgcatcgcgaaagtgccgagcatgccgctgaacaagaacgggaaggtggaccgtgcgatgctcctggaatcgcacggcgaaccggcgaagcgcgagagggctgatcgatgatgatagacgacgcaacgctgcaaaacgcgctggatgcatgcccgacgcctttgtaccttttcgaccagcaggttcttaacgaccgaatcacccggttgcgggcatcgctcccctctcgcataaagctctgctatgcgatgaaggcgaaccccttcatcgtgcgggaggcgtcggctctggcggattgcgtagaagcatgctcgccgggcgaggtgctcatctgcgcgaacgcaggcgtgccgttcgagaagatcgtgctttcgggcgtgtggaaggaccgccgctgcttggacgatctgttccaagcggatcgcatccctcatagattcaccatcgagtcttcccaacagttgaaagacctggtcgaactcgctaacgcgtatcgcaggcgggtgaacgttcttttcaggctgagcagcgaaaaccaattcggcgtagactccgccacgctgaaagagctgattgccggctgcaaagacgacccgttcatcagcatccagggtatccagtactactcgggcacgcagaaaacgtcgctcaagaagcttgatagagagttgaacaagctgcaccgcatcgtggccgaagtggaagccgcttgctcggtgaagctgaacgagatcgaatacggccccgggcttcccgtcgagtacttcgacgaggacgaggagcgggctcgcagcgcgcaggacgaacccgttgccgagcttgcaacgctgctggacggtttccctttcgagggggacgtcgtcctcgagctgggacgcagcatcgcggctgattgcggagcgtatctgaccagcgtcgtcgacgtcaaaacgacgagcgggcaaaactacgcgatcgtcgacggcggcatgcatcagatttcgtactacgggcattcgatggccatgaagtccccggttttcaggaaggtcggcgcaacggccggcgctgcgcagccttggaacatctgcggagcgctttgcacggtcaacgacatcctggccaagcaagcgccgatcgtcgatttgtccgtgggagacgtgcttgcgttctctcgggcaggcgcctactgcgcaacggagggtcgggcgctgtttttaagccgggatcttccgtcggtggtcgtgcgcgacgtttcgggaaatatgcgcattgctcggcatcggctggaaacggcctcgttcaattcatcgaacgggccgcaggatagatcgacggaacaggacgaaaaggagaacggactatgaaaaatcaagttatcgacattctcgaagacatcaacccgggcgtggatcatgaggcgcgcgtcgacctcgtcgattcgcgctgcatcgattcgctgacgatgatcgccttcgtggccgaactcgaagatgcattcgacgtcgagataccccccgtcgagatcgtgcccgacaatttcaactcggttgaggccgtatgctccctgatggcgcgcctgcaagcagagcaggcttagcctgcgcgaatcgctcgagtagggaatcattttaatgacgtcgtactattccgcccttttcttcacggcctttttgccgattacggtcatgttgtacggcatggcgccaaggcgctttaggtgggcggtgctcctgctggccagctacggcttcttcttcgcgctcagcggcgcgcttatcgcgttcgtcgccctgtcgacggcagtcgtgtacgcgtgcgcccgcatgatgggcgccaaccttgcagagaagaaccggcaactggcgacagccagctcgggcaaacgcgagatacgcgaggcctgcaagcggaagaaccgccgtatcgtcttcgcggccgtcgtcgccaatatcggcattctggccgtcctgaaatactcggggttcttcgggctgtcgctggcttccacgctggcggcgttcggcatttcgatcgacctttccatccccagcttcgcattgcccatcgggatatcgttttacacgttgatggccgtttcatacgttgtggatgtgtatcgcgaacgcacgaaggccgacaagaaccttgggcacgtggcgctgttcctggcgtttttcccaggaatcatggaaggaccgctcagcagatacaacgacgttgcgcccagccttatcgcgggcgaaccgcttaatcgaaagaacctgtacgcaggaaccttgcgcattatgtggggcatggcgaagaagatcatcgtcgcggaccggctgaacgcgttcgtgaagccggtgttcgacaattacggttcgtacgacggaggcgtcatagccttagctgcgatcctgtacaccattcagctgtactgcgatttctcaggaacgatggacgtcgccctgggcatgggccgcgtgttcaacgtaacgctgcccgaaaacttcaggcagccgttcttctcccgcaccgcctccgaattctggcaacgttggcatatcacgctgggcctgtggttcaaagactacgtgtactaccctatctcgttgtccaagccatgcaagatgctgacgaccaaggcgcgcaagcgtttcggaaacagatacggtccgcttctggcaagctccgttgcgctgttctgcgtgtggatcggcaacggcttgtggcatggcgccggcagccagtacctcttcttcggtttgtactacttcgtcctgatcatggcgggcggcttgatcgagcctccatgcgcgcgtgcggcgcagcacttcggcatcgaccgcaatagctggccttatcgaacgttccagaccgtccggacgctggcgatcatcttcgtcggcgagctgttctttcgctccaactcgcttgaggcggggcttgccatgatgggacggattgcgggcgatttcactatcgaagcctttacgacgggatcggcgttgcaaatcggattcggcgttggcgacggcctcatcgtaaccttgttcatgatgctggttctcgcagtaggcgtagcgaaggagcggggctgcaatttgtgggagtgggcgactgcgcaaagcgcgctcctgagatggagcctcgtgattcttctgttcgtgggaaccgtgacgttcggagcttacggccttggctacacgccggtcgacccgatgtatgcgcagttttaggagcatgcatgagagcagtgaaactacgcagcgccttcaaggtgcttgcgaccgcggttttcgtggcggctgcaacgctcggccttctttgggcggtatcgagcgtcgtccagccgaaaaacaaccagaaggaattcggccaggtttcagaagccgccaacgggatcttcggcgagccgggccgctccctcgatgcgatattcatcggcgacagcgaggcgtacagctcgttctccccgttgcagatgtgggaagagcatggcttcacctcgtacgtgagcgctacgtcgggtcagcgattgacgtacgggtaccgattgctggaaaaagcgcttcgttcccaaaagcccaaggtcgtcgtattcgaaacgaactccatctactcgccgatcaagccggatgacgcagttctgagccttttccagaacaagctgcccgtcttcgaataccacgatcgatggaagagcctggatgcgcaagacttcttagggaagccttcggccacatggagcgacccgctgaaggggttcgtcgtcaaccgcggggtgaatccggccgacgccgtcaatcacatgacgccgagcagcgaggcgctgccggtagacgttgcgaaccgccagtacataaccgccatggtcgaagcttgcagagcgaacggcgctactcccgtgttcgtcagcacgccgagcacggtcaattggaacacggccaaacacaacggcatgagcgagctggcccgggaactcggcgtcgactattacgacctgaacgaggggcccgacaaggttccgatcgactggagcaccgatacgcacgacaaaggagaccatctgaacttcgacggagcaaccaaagtttcggcttatatgggaaagctcttatcggaaaagtacggacttcccgaccatcgttcggacagcgcctttgaccgatggaacgcatcgcttgaaagatacaagcagcagattgcctcctaggcaaaccatcttcaaggaggccagccccctttgcgcccctcgcgaacagctcgaccgcggatccgcgcatcttcccgtcatgctccggcgacgtaaaggagcctcccgcctctcgaactttgcttccttgtccaagaaacgggaggcggttcatagcgatgccctcgtatcatattgcgcgaagccctatcgtggagcgcacgttttctcagaagggcacgagcacgttcagcgcggcgggctccacggcgatgtcgaacgaggtgccctcgatgagctcgccgtccatctgggcgggaggggcctcgtcgaactcgaggtgcagcgtacggcatcggcgcagctcgatctgcttgaaacgaacgtgcttgccgcctttggcacgcaggaagatgtagagggcgcgcgctgcgccgacgggcggatgggcgacgcacacgtccaagaggccgtcgtcgatgcgcgcgtcggggcagatcttgaacccaccgccgtaatagggcccgatctgcacggcgaacgtgacggattccgcctccaccgtctcgcccccgtcgaacgacacacggtagcgccgcaagtcgagatgatgcagcagctgatcgatgccgctctccatgtacagcacggttcccgtgcggcccgtgcgcacgcgccgctccatcgtgtcgagcgcgatggcggcgtccagaccgaacgagagcgtctccacgaaccaatggccgttcacgcgccctacgtccgcaagacgcgcctcggcccccaacagctgggcgcacgcttcgtccactttggtcgaaacgccgagcgtgcgcgcgtagtcgttgcccgatcctacgggtatcacgccgagcgccggccgccgcgcagccgggcgcctcatgagcccgcccgccacctcgtggatgacgccgtcgccgcccagcgcgatcaccgtcgagcagccttcggcgcgctcggcgatctcggaggcgtgccgcggccccgccgtgcgagcgagcacgaccgcgtcctcccccagctgggcacgcagcaacccgacggcgcgctgcgccgcagccgccccgttgccgttctgagcggcagggttcgcgatgagcaggatggatccctcggatgacagcatgggcgccctttcgtcgttgaagcgacgaagcgcgccgggcgcttcgcgacgcgtctattataggcgaaggaaaccggctgaaaaacctccggcaacgcctgacgaccgcccggaggcgaacgaggccgctgcggctacgatgcggtcgaagcaaccgatccgaaaggagcacttcgatgtcggaactcgtagcattggaaacccaagccccgaaagcgggctatgccatggatgacacgcgcgcgaacgtcgatcccaagccgcagttggaaagcgacctctaccgggcagcaggcaagctggacggcaaggcggccctcgtcaccggcggcgacagcggcatcggcgcggccgtggccatcgcgttcgccaaagagggcgccgacgtggcgatcgcctactactcgtccgacgacgacgcgcaggcggtggccgagcgcatccgcgaactgggacggcgcgcgctcgtgttcaagggcgacgtaggcgacgaggcgttctgccgcgatatggtcgaggggatcgcggccgaatggggtcgcctcgacgtgctcgtgaacaacgccggagagcagacaccggccgagagcatcctcgacttgacccaagagcagctggtccgcacgttccagaccaacatcttcagcatgttctacctggtgaaagccgcactcccccacctgcccgagggaggcgccatcgtgaacaccacgtcggtgaccgcctatcagggctcgccgaacctgctggactactcggccacgaagggggccatcaccgcgttcacccgctcgctctccgagaacgaagacctcgtgagccgccgcatccgcgtgaacggcgtggcgcccgggcctatctggacgccgctgaaccccgcctcgtacgggctcgacagcgacaaggtgaagcacttcggcgagtcgacgcccatggggcgccccggccagccctacgagctggcgcccgcctacgtctttctggccagcgacgattccagctacgtctccggccaggtgatccacgtgaacggcggcaccgtggtgaacgggtagacctttttcagcgcggcggggcgcgtggttcgcgcggttcgccgcgcctcgaaggcttcgcgaaattcttaccagatcctttccctcgcacgacgtgcttcttgcgcgggtcttacgtggctcgcctacgattgagcgcgtcataccgtcgatcgaaaggaaaccatggatccccaacagctcgcgtcagcctacgaccgcggcacattcggcgtgtcgcgacgcgcgttcctcaagttggccgccgtcgccggcgtgtcagccgccgcagggatgctcgtctttccggagcagcaggccgcagccgcgttcacgcagcccgcagccccgaactggccgcctttgtccggcgacaagatccgcttcaccgtgcacagcgacacccatgtcggcgcaagcccgaacaacaactaccgcgacaagatccctgaagcgttctcggccatctacgccatggcacccgacgtggacgcgcatttcttcgtgggcgactcggccgacactggccacccggaccagtacgtcgagctcgcgcaactgctgaacgctaacgcgcgcaagccggtcggcatcgtcatgggcaaccacgagtactacaactggagcggcagcaagcagaacgcccaggacgcgttcaagacgttcctcgcctcggagctgaacgtgcccggttcgttccaaatgccaggcggtgcgaacgaaggccaggtggatgccgacttcgccgtaggaggctaccacgtgctggcggtcgcgcccgaaccgggcggctacgacaacagctggtacggagcgaagcgcgattggatcctcgaacgctgcgcggccgcggcggcggaggatccggccaagcccatattcctgctcacgcatcaccctttcccgaacaccgtatggtactcgggttcgaacagctggaacggccagttcgacgagaatgccaacacggcgcagtccggcgcgttctaccaggagctgtgcgagaagtatccgcagatcatccacttctccggccacacccacatccctatggcggacccgcgctccatttatcaggacgacgggttcacgctcatccaaaccgccacgttcgccaataacttctggatggaaaacgacgggcacgacgaaaccggcagcgcaggcggccacccgaacgccggctgggacgcgaatcaatgcgaactcgtggaaatcgacccggcgaccaactccgtgtccgtataccgactcgacttccgcagcggatgcgccctcggcgcaccgtgggtcatcgagccgtcgaagggaacgaccgcctttcgctacacgcacgcaggcatggccgcgcgcagcaagccgcccctcgtgctggacggcgccgaagtagcggtgatcgaggagtccgtcacggcgaacggtgcctcgttcagcgtaaaggccgcccgggtggcgcccgacgcaagcgggctcgaagacgacatcgtcatttcgtatcgcgcggtagtcgccttggccgaagcgcctgacgcggcggtgtacgatgcgcgcttcatgtccgactactacaaggccgaggcgaaccgcgccgaggtgttcgagcgtccgctgttcggcgcggggcttgccgaggacacgtcgtacgtgctgcgcgtgttcgccgcgaacccgttcgggaaggagacgctcgtcggggaggcggcgttccgcacggcggcccgggtcacgccggctctgggcaacccgctgctgtccgtggacttctccacaggaagccacgcagatgccgcgttggcgccgcacaacgccgtgcccaccggcacgctgacctacgagagcgattcgttcggcgtgcccgtagccgtgttcgacggctcatctgccgtaggatacgatttcaccgccgacgattacgcggccatcgcgcaagccgaaacgatcgaagtgctgttccaattcacggcgaacccgacgagcggctacttcgacttgttctccagcgcgcaaggcgccggccaggacctcagctactatgcgccccagctgcagcactacgtcaacacgggatcgggctaccgctgcaccgaagccactgtgccgctgaacgcctggacgcacgtgctagccacctacgatggcgtcatcatgagctactacctgaacggggagctcgtatcgacgctggacaatccgggatcgatccctgcgcccaccgcttcggcgacccgttggttcgtaggagccgacgtcaattcgaacggcgagatggagaagcccatgacgggcaaggtagcgttcgcgaagctgacgcccggcgtggcgacggcagcgcaggcagccgaactctacgtggcggctgcgcccgttgcggcggcggtcgcacccccgagcgccgacgccatcgggacggcgaccgcaggcgaggtctacgccatccccccgctgccgttcgccgacgcgaacggacgggagctgcagggcatcccgtcggtcgtcggtcccaacggggcggcggtggacgtcgtcaggacggaggccgagggggtcgccgcctaccgcttcacgcccgccgtcgaaggcgcgcacacggtgacgtacgccgccggctacgcgcagcggcccacgttcgagctggccgtggccgccgccgtcgcgaagcccgatcccgacccggaacccgatccctcgcccgacccggagccgacgcccgacccggagccggaacccgatcccgaacccgagccgacgcccgatcctgcgccggagccctcccccgctcccgacgccttcgcgcccgaagtcgtcacgtctacgccaacgccgcaagcgaagaagctggcccggacgggcgaccccgtcgccatcggtggcatcgtcgtcggcgtcgccgccaccgccggagccgccatctgcgtggcccgcagcctcatgaaaggagagttgagcgaggaggagtaggcggcaccgccgccgcccgccatggcgcggcgagagcgcacgggctcgtgcgtctctcgccgcgccagtcgtgcgtggatcgcgcgccggtcgcttcgcgcatcggcgaggaagcctctcgcgaactgcacgccggcgctccgcacgtcatgggagggttgctacccgcgctcgaattccaagtcatgctcggccacttcctccagcctcgcttccactgccgggccgagggagccgtgcgccgcgtcccactcctcggggtcgccgtcgagggccatgccgcggtactcctccgtgcgcttgcacgccgacaccacgcgcacgatctcgccgatcaccgcgaacgccagcacgccgaccagcatgggaatcttcgacagctcctcctccgagccgttaagagacacgatggtggcgatcatggccagcaccagcagacgacgggcacccagcacgccaccgtcgcggcggccttgccgccgggcatgcggaagacgcgcatgcgatcgggatccaccgagcgcagcttgaggaacgccgggaacatcggcatgtagctgatcagcaggaacacgatgttcatcgagaagaatatccagaagaacccgtcagcccgacggccgacataatgggcgacagcgagcacgagcgcgcttgcgatgccaccacgccgtttacgagcgccgcgccggtgggcatctggttcttctcgttctcgtgcgcgaacaccttcggcatgttcttcttgcgcggccgcgtgctcggccacgaagttcacgccgaacgaccactgaccatgttgccgaacagcgtgatcaggaagacgatgccgatggcgatgaacagcaggctgccacgccggccatgatggccacggcgtccatgatgccgagtccgagcgagacctcgttggccgggatggccgcgccgatgccgaacgagctgaacaggtagatggccgcgatggcgatgccgccggcgatgatggccgtgggaatctgcttcttcgggttctccatgtcgttggcgaacacggcgatgacctcgaagcccatgaagttgaacaggatgatggacaagtacgtcaggctgctcgcgtgatcgacggcaggaacgtggccggcgacatgtcgctggcgaagccgttcgttcacggcgtaccagatgccgaggccgcccaccgacaccgcgatgcccaccttgagcacggcggccaggttgaggatccagccggagtccgacaccttcgagaagctcatgaacacgacgatccacacgaacgccagctcgatggcgagcgagggaccagctcgaactccatgccggtcatcatcgcgatggtctcggggaacaggaaggccagcgacgccatccacagcgggaagttgatccagtagtaccagctcacgcggctgccccacttgtcgccgaacgcgcggcgtacccagtcgtacaggccgcccgtcgtcgaatcgtaggtggtgcccagctcgcgacaccatgaggccgtacggcagaggaacgcgatgatgaggaagatccaccagaagaactgggagttgccgatggcggcggcaggcgcggccgcctcggccacgaacacgacgcagatgaccgacaggatcgcgtcgatcatgcggaatttctttttcttggccatcagattatcccctttcagagtgggttccatattggcgttgcagatgcccccccaggggagccgccttcctggagaagggcaggtacttcccgatcttccccagcaccgcgttcatgcgagcctcggcggcgtcggcggcgtcggcatcctccttcgtcttcgggcagaggtaggccaggatggcgcggatggagtgcttgcggttctcggcctcgacccagcagaggctccgctcgggagccgtcgatgacctcgtcggtcacttcctcgccgcgggtggccggcaggcagtgcatgaacttggagtccggggcagcggcgaagtccatcatctccatggtcacctggtacttgggtagaagatgtccatgtagctctcgccgccctcttcctcgtcgtacaggccgtaccacacgtcggtgtagacgaagtcggcgcccttgatgcactcgatgtcgtcggacacggtgacggtgccgccggacaccttgcagttctcctcggcgatggccatgatgtccacgtcggagtcgaccacgaggccgccgtcggtcacctgcttgcccttggggccgaagtgcacgaagtccatgcccatcttcgaggcgatgaacatgagggagacgcacacctgcgtggcgtcgccgatgaaggcgagcttgcagtcctcgatcttcttgccctcgggcaggttctcgatcatggtcaagaggtcgcccagctcctgcgtgggatggttgaagtcggacatgccgttgatgaccggcgcggcggagtgcttcgccaggttcaccacgtcgggtggcggttcacgcgggccatgaggatgtcgacgagcgagcccatgacgcgggcggtgtcctcgagggtctcgtggccgcccagctggatggtgccgggcgcgaagaactgcgcatggccgcccaggtcggtcatggccgtctcgaaggagatgcgggtgcgggtggacacctgctggaagatcatgagagcgtgcgggtcgctcggggcggcccgcacatggatgcaaacggttcgcggatctgcctagcccagcttcgcggcgatggcggccgggtcgggctgctgcagggccatgcagtggatgttgccgccgcacagcgaccactcgcgggtgtagatcttgatgatctcgcggtcgggcatgagctcggcgaacatatcgcacgccacctggtccatcggatcgccgtactggggaaccagcaggccgccgttcacgaagtagctgttgatgtacgtgatggccaacggcaggtcggcctcgcgggacgcggcgtccttgcagagatccacgccggcgctctcctcctcggagatacggatgatgccggggatcgggatcttgtggatctcgaacgtgcggcccttcgcgtcggtcgcctcggacagcacgtcgtaggcggccttgaggttcgggtactgcgggttgtcctcgtcgtcggtccacgaaagcgccagcacgccgggacggacgaagaagcacacgtcgtcgatgtggccgtcagtctcgtcgaaggccatgccgtccttcagccagatgaccttctccaagcccatgtactccttgaagtaccactccgcctcttccttggtgaggtgcgggttgcggttgtggttcagcacgctgttctccgtcacgataagcgtcccctcgccgtcgatctgcatggcgccgccctcgaacaccatcttcgtggcgtcgtacgcgtcgtagttctcgaggtccaagagcttcgtggcgaattcctggtcgcgcttccacgggaagtacaggccgccctcgagcccgccgtacgcgttccatccccaggtcacgccgcgcatgtcgcccttgtcgttcaccacgtagaacgggcctttgtcctgcgcccacgcgtcgtcgatggtcatctcaaccacgcgcacgccctcgggcaggcgggtgcgggcgttctcgtactggtcggccgagcagaacaccgtcagcggctcgtgcttgatgatctccttcgccacctccacgaggacggcctgggcgggcttgccgccgttgcgccacgtgtcctgacgctcgggccagatgaggaagtcctgcttgcgcggctcgaactctccgggcatgcggtatccgtcttgcttcggcgtgctgtcggtgatgatcttcatgatgcgctccttcgctgatcgtcgtggcgttcccgcctgatgaccccatcctaccgacgcgccgcgcgcgccgtcagtacctgcgaggagggcgtttcaacagtacccctccccgcgagggtacccggacgggtaccctgacgcgagcgggcgcggatatggtacgattaccttcaatgcgaaagagcggtgcgacagagaagacgggtgagcgcatggtggagctgagcgacacgcgatggcgggcgatcgacgacttgctgctcgcgctctacggcgcgtccgacctcgccgacctgcggcgacgcgtcatgcgcggcttcaaagatctggtgccctacgacaaggggttcttcgatctgtgcgattgcagcgagagcgggcgcttcgtgttcttcgaccccgtgtcggtggacatgaccgacgaggagctgctgtcgtactaccagaagtacgagccgagcgactacaccacctggctgttctcggtcaacgaccccgtggtgtaccgcgattccaccttcgtcaccgacgagatgcgcaagcgctcggagctgtaccgcgaatggatgatccccatggacacccatttcagcatgggcagcacgcaggtgggaaacgggatgatctacggctccatcaccctgttccgcaaccgcgcgtcgggcgacttcaccgaggaggaggaagagcgcctcgccgtgttgaaccggcacctctcgacctgcctggccgtcgcccacccccggggcctgcggcgcgacgaaggcaagcccgtggtggggcgcacgagcctgaccgcgcgcgagcaggagatcgccgcgctcatcgccgagggattgagcaaccagcagatcggcctgcgcttgttcatctcggagaacaccgtgaagaagcacgtgaagggcatcttccaaaagatgggcgtatcgaaccgccatcagctgatggccgaactctaccgaaccgccgccatcgtggtggacgcgtagagcacgccggaccagctcgcttttacggagcagctagcgagcgaggttcgcggttccttggatctcgaacgggatcgtgcggagcggcgcggccgactttgaaagcgcggccttcgcctgtgctcgtctcgcccccccccgaacgcgcatcgacgaaagccgatcggcccgtgacgcagaaaaccgccccgcatggcagaaatgaagcggtttggtaatcccataggctccgatcccgcccggtcggagccatggttcgcccttctcaggtaaaaacgacccgaaaacgcctggtcggcgaaaacctataaacttgatctgtttgttcatgtttaccaaaccggcttttttctgccatgcggggcggttttcagcttcacggacgagaggggagccgcaccgtcccagccgatgctgggcacgcagcgccagagagaatcagaaagcgtgttcccagagaccggacttgccgccttctttcttgagcaggcgcacgtccatgatctccatgccgcggtcgacggctttgcacatgtcgtacacggtgaggcacgccacgctcgcggcggtgagcgcttccatctcgataccggttttgcccgtgacgccgcaggtggtggtcacatggatgcccacgaggccgtcggggcgctcgccttcggccacgggcgcgcactccaccttcgccttcgtgatgttgagcggatggcacatggggatgagggagctcgtctgcttggcagccatcacgccggccacgcgcgcgcacgccagcacgtcgcctttcgccgccttgccctccacgataagcgcgagcgtctcgggatgcatggcgatgaagccctcggccacggcgactcgctccgtgtcggctttctgcgacacgtccaccatgcgcacggcgccctgctcgtcgatatgggtaagctgctgatcggtcatgggtatctccttggttcggtatctcgcaggttgaaagatcgcaggttggcgcagcgagtcagcgagaagggccgaggtgcgtcgaattcgggggattccgaggatgaagcgtacttcggtacgcgattcctcggaatcgcgcgaaggcggcgtgcctcgacccttcgcagcgtcggcaggttccgcttgccgtaggcaagcggaacctcttagccgccgatttgcgacatgccgcgctcggtgcctactttgtcgtgatgctcgtcgggcttcgcgcccagggcctcggcgaacacggcgcgcaccgcctggtcgtctccggcgcgcaacgcggtgcgcacgtcgtactcgtcgtccgagaacaggcacgggcgcagcttgccgtcggccgtcagccgcaggcggttgcattcgctgcagaagtgacgcgacagcgggctgatgaagcccaccgtgccctgcgcgttcgggaactcgaagtagcgcgcgggcccccacccgagcgggcggtcgttgccggccggcaccagctcgtccatccctgcggcgcgggcgcgctcgttgatgatctcgaacagctcctcgctgggcacgacgtcgtccttgccccagccgcagccatggctgccggagctctcgcccacgggcatgtactcgatgaaccgcacgtgcagcgggcgatcgatggacagcttcgcgaacgcgaggtagtcctggtcgaggctgcgcacggccaccgcgttgatcttcacggggttgaacccggccgcaagcgccgcatcgatgccgtcgagcgtctgctgcagctcgccgcggcgcgtgatctgcctgaactgcgcgggatcgagcgtgtcgagcgagatgttcacgcgcgacaagcccgcttccttgaggtcggccgccatcttcggcaacagcacgccgttcgtggtcatcgacacgttctcgatgccgggcgtatgcgcgatagcgcgcacgagatccaccacgccgaggcgcacgagaggctcgccgcccgtcaggcggatgctgcggatgcccatgcccgccgccacgcgcaccgcctcctcgatctcctcgatgcgcaggatatcctcgtgcgcgagcgattgcacgccttcctcgggcatgcagtagatgcagcggaaattgcagcggtcggtgagcgatatgcgtaaatagtcgatggtacgaccatggctgtctttcacaggacgcactcccttctcgtctgaggatacagtatagggcatcctcggatcaccgcatggcgcaatatcgcgaaaggatcggcgcgcgctgaatacacggatgcggcgtgctggattcgcataccgcacagcgaaaggcacgttgctcaccgacgagctgcttgacgaatgagccgaagcatgcgagcgcggcgaataccccggcactgccggcgaaatcgtggtcgggcggccgcgcgtctcggccgaggatcttgcaaccgtcacgttcaagctgctgaaatcccaggtcgccgccctcgacgaaaccgcaaaacgcgcagacgagacgcgctcgcagttcttgcgctcgctcgtaggcgaggctctcgcgcgaggatgacgccccgccccatcatgcaggaggcgggcaagcgagtcggacgcacctgcacgcgagggcgcactgcgcccgggaccgtctttagcgcgataccaggtacaccttgtcgggaggaatgcggatccacagctcctcgccctcgtgcggcagctcgtcgacgggcacggccagcttgtcgacgcgccagaacaggtgctggtgcagatacttcatctcgtcgtccgtgcgcgacaccgtgggagcctcgctctcgtcgcggtcgagaaagcccagcagcaccgtgcgctcgaagcgcgagtcgctgacgcggtccacgcgcacgcggtagcagttctcgccagggccgtcgacgcgttgcaggaagaacgcgcgcacgccgagcgccttcacgtcctcgggcaccgccgcgctcgtcgcggcctcgatgccccacttcggcaggcgcacgcgatgctcgcccgtccgcacggcagccgtggcgttcttgcagcccgacagcttcacgcccgccagcgactgcggacggttcaccaggtcgtcgcccgtgcccgtctcggtgatacgccccgcctccaccacggcgatacgatcgcagaatcgcagcgcctcgtcgatgtcgtggctgacatacagcaccgtgccgtggaacgcgtcgaacaggctgacgaggttctgctccagcacgctcttcaagtgcgcgtcgagagccgagaacggctcgtccagcatgaggatgcccggacgcgccgccagcatgcgggccagcgccacgcgctgctgctggccgcccgacagctgagccggatagcgccggtcgaacccttccagcccgaaacgcttgagctctgcggccaccagcgcgtcgcggtcggccttcgacgcctcgcgcccgatgcccgcggccacgttctcggccaccgtcagattcgggaacagcatgtagctctggaacagcagcgccgtcttgcgctgctgcggcgtgaggttgatcttccgctcggaatcgaagaacacccgatcgttcaccacgatgcgtccctcgtcaggcgtctcgatgccggcgatgcatcgcatggtaaggctcttcccgcatcccgatgcgcccaaaaaccccagcgtctcgtcccctgcctcgaacgccacgtccaacgtgaacgacgagaacgacttgcgtatgttgacttcgagactcatttcggcaattccttcccaaagacactcggcttgcgccgcgcgggatccctcgactccgcgctgcgcgctgcgctcaggatgacagggcccattacgcttccatccccctgcgatagctcgtggtgcgcctgctccacaggttgatgaacaggatgaccacgaagctgaacgccatgatgacaaccgtccagaaaatggccacgtcggtgttgccgttcatccactcgaagtagatggcgatggggatggtacgcgtgattcccaggtagttgccggccagaaacagcgtcgcaccgaactcgccgagggcgcgcgcgaacgacagcacggtgcccgccgcgatggacgaccacgacagcggcagcatcagcttgaagaatatcttcgcgttgctccagcccaacgtgcgggccgcgtccagcatgttcggatcgaggttctcgaacgcgccgcgcgcgctgcggtacatcagcgggaacgccaccaccacggccgccagcacggtggcctgccagctgaatatcagcgggaagccgatgtcgatgaaccactgccccaccgcggtgttcttgccgaacgccagcagcagcagaaagccgcacaccgtgggcggcagcaccatggggatggtgaagatggaatcggcgatatcctgcgcccgcgcggggatgcgcaggctgaagtacgcggccaaaagccccaggacgaagatgaacacgatagccgtgagcgtcgtcttcagcgtcacccacaacggactgtagtcgatgcccttcaagaacgacgccaacgcctcgaagccctcgggggccccgatcacgctcacctggtcggcagacgcgagcgtggcgaagtcggcatgagtgagccgcacataggacggattcgacgcttgcgtcacgtcggagccgtctgcaccgacgacgcagacgtagaactcgccgggcttgagctcctggtcgaacttgtagaccacgccgtcccgctcgaactcaggctctccggtgaacgcccactctccctcggcggacaacgtcgcgccgcccttcgaattctgcgcgtcgagagccacgagcaactgcttgaggaaacctcggctctcggacgattcggcgtcgaatcccacagcctgcgcagtctcgggcggcacgtggaccacggtgagctcgtcggcggcgacaaccgcgagactacccgactcgtccgagacgaaatagcggtaacctgcatagacgccgttcacgtcgctgttgctgcccacctgggaacgcgagaaatcctcgagcgcgaaggggctgccttcgaccgaagccgatttcccgtcggcggcgatgttcacggcatcgtcgatcgccgtgtcctcctgcgccgattgcgccgatgtgccacccgctgccgcattcggcgcgtcgagatcgccttcgtcatcggcgccagcaagggcggtgccggggatgaaagcgatcgccattgccaaagcgcatgagacgatcggcatcgcagcgcgagagaagacgccaacgatgcggtcgattagagtgttgtccataagatcgtccttgtcgcacggaaaggatgggcgtgtacgatcccatcctttccttgtcactataccgtatgtgcgcctagtctaggaaaccagctcgaagccccactcctgccaaagcttcttggcatcggcgttggtggtagcccactcgatgaactcgtttgcagcctcggcctgcgtggagtccttgcagatggcagccgggtagatgatgttcttgtgcgtgtcgtccgggacgacgccgataaccttcacgccgccgaagcggtacacgtcggagctgtacacgaacgccacgtccacggctccggactgcgcctgcttgcacacgttgcccacggaactctgcaagttcaccttgccctcgagcggcgttccatcgtaggagccgtcggtgccggcgctgtccttgccggtcttgccgtcggcgtcgatgaagcaaccgacggtggaaagcgcctgattggtgtagttgccggccggcacagaggcatcgcccacagccactgtgtaatcgccggtggcaaggtcgtccagcgtgaagctctgatcagcgtacttggcggcaagctcggaatcctcaccggcaaccatcacgaggtcgttcttgaacatgtcgaagcgagtcgcctcgtcgacatagcccttctccacggcatcgtccatcttgcccttggaggcggagatcagcacgtcggcgtacgcgccgccggcaagctgctcgttcagctcgcccgaagacagatactgcgtgtccttgaacgtcacccaggtatgatcctgcgtgtacagctcctgtacagcgtccatggccttcgacagcgagttcgcggcgaacagctgcagctccacggcctcatggctctccgacttggcctgctcttcggcgggcttctgcgtctcgccggcttgttgctcggtattcgacgagcagcctgccagcgcgaatgcgcccaccagggcgaacgcgcacacagacgccaacacgacgcggatacgtttcctcataatgaccttccctcgctctcttttcgatggagcccgaaccggcgacgaaggccggccccgcgagggccgcatcgctcccgggcttcgtccatactattcctatcaaagattatagtcaaacacgaatatataccggaagcgaatttttccgagagcgctcgcggcctacctcatcgccaaatccaccacgcgggtggcgatgcgctcggtgagcgcgtgcgaatgggacacgaacacgaggccgatgccgcgagcctgcgtttcctccacgagaaaacgccagatctgcgcctgagtgacagcgtccagcatggtggacacctcgtcagccacaaggtagcgcgggttcgccgccagcgcgcgggcgatgcagaagcgctgcagctcgccgcccgacagctcgtgcgggaaacgcgcgagccaccgtttctggatgcccaggtcgtccagcaagcgctgaggcacctctcctgcttcggccagcgtttgactcatgcgcatgcgcgggtcgacggcggtttcgggatgctgcaggatcagctgcacgggacacgtgccgcgcttcggcagcggggcgccgtccacgaggatctcgcctttctgcggacgatcgtatccggccagcatacggcacagcgtggtcttgccgaagccggacggcgcgctgagggcgacgcgctcgtcagggccgacggccaagtcgaagtcgcggtacagcggcgtgcgcgcgccggggtacgcataggttatgccgcgcgcctcaagcatgggaacccccttccgtcgacccgcccggcgcctcgaagccgtgctcgggaagcgcatgccacaactcgcggctgaacgggtgctgcagcaggtcgggagacgcgaagttcgcaactgccgtctcctccaccaccgtgccgtcgcggaacaccgccacgcggtcggccacgcgcagggccagctcgatgtcgtgcgtgatgagcatcacgccgccgcccgcgtcggcgaaggcgcggaagtcgtcgagcgcgcgcacggccagatccaggtcgaggccgggcgtgggctcgtcggccacgatgacgcgcgggtcgtccatgagcgcgcagcacaaaagaacgcggcgcgccatgccgcccgacagctcgtgcggatacttccccgccgtgtcctcgggcagtccgtagcgctcgaacagttgcgcgcgccgacgacgacgctcggcgcgcgactcgtgtgcgcgcgcgaagccctccacctgacggcccaccttcatgagcgggtcgaggttgttcacgctctgcggcaccagcgagatgccgtggccgcgcagcgcggaaagcgacgccgcatcctgctgcgcgccgtcgaaccagacgcggccgcgcaccgtggcgttcggctcgaacagccccaacacggcatcggccaaaagcgtcttgccggaacccgacgcgcctaccacggccacgatctcgcccgcatgtacggagatgcttaaagaatggatgacctcgacctcgcgctgcttcgcgcgaaagaagggggcgtcctcgtcgtacatgcggaaccccacgctgaggtcctccacctgcagcaggtggtggccgtgctcgtggcgggaaacgggcgcgtgcgtatgatggtggtgcacctgcgcgtctttgtgcgaaagagcctcgtgcggcacgacgtcgggcgcgaggccgtcgatcggatcctcggacgctatcgcgcagtcgcggccggcgccttccgcaccgaacagctggtcggtcaggcgctccagctcggcagcggcctcgtacagcgcccgctcgcgagcggccagatgctccggcagcgggttcctgccgtccgtttcaagcgggttcttgcggttcgcttcgtccatgacggcctcctattcctgcgcgctgtgcgggtcgacgagcttgcgcaggctggatcccgccaggtcgaacagcagcacggtcgcgatgagcgcgagacccgggaacacggcgagccaccacatgccggccgacaggtacgccatcgactcgctgaggatcacgccgatggcgggttgctcgggcggcagaccgaagccgaggaacgtcacggcggcctcgtgcaggatggcgtgcgggaacagcagaatcaaccccacgatgaactggggcagcacgtaaggaaccatgtgcttcgccgcgatgcgcagaggagtctgccccagccgccgcgccgcagccacgaacgtcgactgcttacactgcaggatctcggcgcgcacgacgcgcgcgaggctgggccagtgcgtcacggccacgccgatggtgacgccccagaagcccttccccaacgcgaacgagatgaggatgagcagcacgatatgggggatgcccagcatgaggtcgatgagccaggtgaccgcggcatcggccttcttcccgcccagcgccgccaccgcgcccatgaccagcgcgatgatggacgacacgcccgcggccagaagacccaccagcacgctggtggacagccccgccagcgtgcgcagcagcatgtcgcgccccatccagtcggtgccgaaaggatgggcgaagctgggagcgaggttcttcatcgagaagtcggttgccgtagccgcatccgcgacgacgagccccgcgaccaccacagccgccagcgccgccaaagcacccaaaaacgccgccagcgtcaacctcctattccccacccgagccgcgcgaggagcatgcagaaggggcggcgcggcatccttggagccgttgggctcggcagttcccaccaagcgagtttccccttcggggacttgctgcgcttcgctccgcggcgccgcacccatcgagccgaaacgccctgtgggcgtttcgtgcgagccaggactgccgagcgactgggaactgccgaacccgacggcggactcgcaggttaagcaggtttcaacgcgctcgtcagccatgagcagcccccttgcgcatgcggggatccaccacgccgtacagcgtgctggctatcaggttgccggtgaacacgaaggcggcggagaatagcgcgatgcccaccaacagcgccgcgtcgccgccgaggccggccgtgacggccgcctgccccagacccggatacgagaatacctgctccaccagcaccgatccgccgaatatctcggatatggacgcgaattgcaacgtgagcgcgggcagcgcgaggttgcgcaggccgtggtggcgcagggcgccccaggtgctcaacccgcgcgcacgggcgaaccgcacgtaatcgctttccagcacgtcgatagtcttctcgcgcgtgtgcagcgcgatgttcgccacgccgatcaccgacagcgtgagcgctggcagcgccagatgatgcagcgcgtcggcaaaggtcacatcggccgccgacaccccgatgggcaccgagaagccgaacgggaaccaccccagctgcaccgagaacacgatgagaaacagcagccccagccagaacgtgggcaccgaagccaacaggaagcagtaccccttcacgatgcggtcgatcagacggccgcggttcgcgcccgcgaggatgcccaacgcgaagcccagcacgccgctgaccgcccaagccgtggccatgagcgccagcgagttcaccgcccgcgtggcgatgacgtcgatcaccggcgcattgaagcgcagcgatgtccccagatcgccgtgcagaaggtcgacgaaccagttggcgtagcgctcccacaaaggcgtgttcacaccccagtattcggccagttgcgcccgcttcgcctcgctcatgttgatataggccgtctgccccacgttcgcctgcaccggatcgataggagaaacgctgaccagcacaaacgtaaccaaactcaccgcaagcatgagcaagataaacttcgctatgttccgagccaaaaatcgagccatgaaaccactataccctcactagcagaaaaaccccacagcaacacccctccaacaagcgcaaacggcgcccagtcccccaacgcgcaagctcgttacggtcagcgggaggggcgccgcggtgcccaccaagcgagttccgcagcgaagcgaggactgtttgagcgactgggcaccgcggcgcccctcccgcgtcgagcacaataaacttacgcccaggaccactggtcgacgttattcaccagcgaccagccgtgtccgtgcggatgaggcttctgcttcgcgatcttgaggttgtccttcgcaaagtacaagtggtcgatgttcgcgaaccacacccacggcgcgtccccctgcggcgcgatgccggactggccgtcccactgagccttcttccacagatcgaacgactcttccacagtaggctgggccagcgcctcgtcgaggtacttgtcggtggtttcgctcgtgtagcaggcgtagttgcccgtgcccttggagtagaacaggttgtaaatctcggtgggcgcgttcgtgccccagccccacaccaccggatcggtaaactgatgcgggtacagatcgtcccagctggcgcccttgatggatacttcgatgcccagctctttcatctggttggtgaactcctcggcgataccttggcgcacggtgtcgccggccgagtagtacaggttgaacgcagcgcgcgtgccgtccttctcgcggatgccgtccgcaccggccgtccagccgccgtcgtcgagcagcttcttcgccttctcgacatcggtggagcacttcatgtcgggcgaggaccacggcatgccgtcgcccacgctgtaggccacggtgccgtagccgttcagcacgttgtcgatcatcttgtcgcggtcgacgccgtagttgatggcttggcgaatggccaggtcgcacgtgacatcgttgccggccgccgcttcgcccttctcgtcggttttcatggcgcccgccggaatcaccggcagcgagatgccgcgagagtcgaccgacgcgcagttcagcaagtcgtagccgctcggctgctgagccgcgaacgtcgccgaggtgtatgcaacgtcgacctgtccggacttcgccgccgcaagcgaggcgtcctcttccatgaacactaccacgacgcgctggatgttcggcgcctcgccgtagtagtcggggttcgccttgaggatgacctgctggcctttgtcccactgctccagcatgtagcgccccgagccgatggggttgtcgccgtacgtgtcgccgtaggcgtgctcgggcacgatgcccaccacggccagcgtgtacagcagcgcgttgaacggcttctccatgtgcacgacgacggtggcgtcgtcggtggccacggcctctttcaccatggacatgtcgcactcggatgcttccgagttcaagatgccgttgatggtgaaggccacgtcgcgcgctgtgagcggggtgccgtcggtgaacttcacgtcgtcgcggacggtgaacgtccaggtcatgccgtcttcggacgcttcgtaggacgtggcgaggtcgttcttgaagttgaggtccgcatcggtggtgatcagcgtggactggatcagcggctcgtgaacgtgctcgccgcagccccacgacaccatcgggtcgaagccggcggccggctcggatccggtggtcatcgagacgataacctgcgaagaggccttgtcggccgcaccttccgtcgcgccttcggccggcttctcggcctcgccgctcgcgcagcttgccagcagcccgcccaacgacagcgtcgccgccgtcgcacccgtcagtttcgcgaaatcgcgtcgcgtgagtgttgccatgcttccgttcccttccctcaacgcctcggcgccttgaatccgccataggtgttacgtattcgaattgcgtaacacactataccagagggggctcctttcgaatgttacgaatttcatttccgtaactcccccgggcgaacggcagacgaagaagggcgaacgcaagccaaacgtacgaatgcttcacgtgaaacatcgacggattccttctgccgacatccgacaagggagccgatggcaagaaagcatcgaattcggaagacggggcgcagcccgctatcacgacgcgaaacgattttcctcataatgcctggtcgcaacaacgcctcctcctgccagaacgatccgagaccttgcggtaaacgttctttcttccgaattcgatgactttttgccttttcgaaagcaaaaggatgcatgggggtcatccgcaggacatcggatccgtcggagacggatcctcgtcgagcctcatgtatcaagcggagcatccgagcaatgctccccgtgaaacatcggggcgcgacggagcccgggcgtcctactccggagcctcgccggtttcgaggatgcgcagcagggcagcttcgtccagcacggggacgctgagggcgacggccttgtcgtacttgcttccggcggcctcgccggccacgacgaagctcgtcttcttcgacacgctgccgctcaccttcgcgccgcgcgccttgagcacagcgcccgcctcgtcgcgggtcatcccgctttccacgagcgagcccgtcagcacgaacgtgagccccgccagcgtctgcggcagctgctcgcccgcgtccgcggcctcgtccgcaagcgccacgccgtgcgagcgtaagcgctcgatgacggcggcgttgtcgggcgtgcgcaggaacaaatacgcgctgcgcgcgatcttcgggcccacgccgtcgatgacggcaagatcctcttccgaggcctccatcagcgcctcgatggacgggtacgccgccgccagcagctcggcgatggtcttgcccacgtggcggatgcccagcccgaacagcgcgcgggcgaacggacgcgtgcggctctcgtcgatggccgccaccagcttcttcgccacggtggaccccaggcggatgggctcgccgtccttgttcacacggcccatgtccagaagcgacagctccacctcgtccagcgtgtagtagtcggccacgtcgctcaaacggccgctctccaccaggcgcgacacgatctcctcgcccatgccgtcgatgtccatggcgccgcggctggcccaatgcagcaaacgctccagcgcttgggccgggcagtcgatggagatgcagcggaagtccacctcgccctcctcgcggataacgggcgaaccgcacgacgggcacgtgcgcggcatctcccactgtacggcatcggcggggcgcagcgccagcaccggccccagcacctcggggatcacatcgccggccttgcgcacgatgacggtgtcgcccacgcgcacgtccttgcgctgcacctcgtcttcgttgtgcagcgtcgcgcgcgccacggtggagccggcgaccaccacgggatcgagctcggccacgggcgtcagcttgccggtgcgtcccacctgcacggtgatatcgcgcaacagcgtggtcttctcctcgggcgggaacttgaacgcgacggcccagcgcggcgcccgggccgtgtagcccatcgactcctgctgcgcgaacgagttcaccttcaccaccacgccgtcgatctcgtagggcaggtcctcgcgccgcgccacggcgcgctcgcagaacgcgtgcacctcctcgcgagtctggcacagctcgacgtcggggttcacgtggaagccagcctcgcgcagccacgccaaaagctcccactggccctctgcgttcagggcgcgctcgtcggccaccgcgtagatgaaggtggacaggtcgcggttcgccgtgatagacgggtccttctggcgcaggctgccggcggcggcgttgcgcgggttcgcgaacgcctgcttgccgttctcgacggctgcgacgttcagcgcgtcgaagctggacttcggcatgtacacctcgccgcgcagctccaccggcgcgtccgcgtcgcgcaagccgcccagcgcgccctggcgcaggcgcagcggcacgtccttcaccgtgcgcatgttggcggtgacgtcctcgcccgtggtgccgtcgccgcgcgttgcggcgcgcatcaggcggccgtcctcgtacgtgagcgcgatggacgagccgtcgatcttgagctcgcacaccacgggcaccatgcgcccgaacgcctccgtcacacgctcgatccacgcgtccagctcgtccaggtccatggcgttgtccagcgagtacatgcgccgggcatggcgcacgggagcgaactgctcgcccacgtagccgcccacgcgctgcgtggggctggacgggtcgatcagctcgggatgcgcggcctccagctcgcgcagctcgcgcatgagcgagtcgaacgcggcgtcggatatctcgggcgcgtcgttggcgtagtacaggtagctgtgatgctcgatctcgcgccgaagcgcgtcgatgcgcgccgccggatcgttggtcgcttccgcaagcgcctgctcgtcgagcaaagtctgctgttcgtctgccatattcgccaccgtttcgtgcaatcgggaagaaggccccgaaacgatcggggccttcgcctgttttcttcggaattctaccacgagccgcgaaacgctgcgcgctcggctcggggtttcagcaaacgctccacggtagcgcgcttgcgctacgccgccatggctttgccggcgttccagccgtagaagatgagcgacgcgccgcgcattaggatgaacaccgacaggaacacgcccagcatggccggagcgatgaagaacgtcagaccgcacagcgccccgacgatgcccgagaacagcatccaaccccacatcgacacgcccatgttgcgcactttgaacgcgccgacgacctcgaacacgccgaacacgatgaagaacgcgccgatgaaccacgccagcgcgccggccgacaccagcgggttcaccaaaaacaggatgcccagcacgatgtcgagcgcgccgtaggccagcgcccagcccgacaggtccatggcccggcggaagcggaagtagttgacgatgtcgaagatgcccgacaccagaaacgccgcgccggcgatcaccgtgatggtgaccagcgccaagcccggcgcgaaaaggaagaacatgctgcagatgacgagcaggacgcccgcgatgacgaggccccagtcgtgcttgttggtcgtatccatgagattgctccttggtcgcggcgaccgcgccgcgcaacacgtccgaaaaccggtgcggcgccttggttgtttaccgccattctagcgcagcggcacgtccgaacccccagttcgcgcaaccgtttacgtacggttacgggcgaattcgacgcgttgtcgccgattcgacccgcagtcgcgctcaggcgcgatacgcggtagaatgcgagcacgcggttcctcggaagacagggcggtacgaccatgcagaacgttcgagaatacagcaacgacgagctggtggccctcgtgccgctgccggccgacgacgcgaacaagtactcgcgcggcacgctggccgccatcgtgggcagcgagcgctatccgggcgcagcgtgcctggcggcctacgccggccagcgcatgggcgccggctacaccgaggtgttcaccagtccgtcggccgtcccgctcgtgcaaggctttcggccctcgctcgtggtgcgcccgcgcgcggctctcaaggcgaaccttccggccgcgaagcccggcaaaccgcgcgcctacctcgtcggctgcggcttcgacgcagaagacgtcgaagccgagaagctcgttcacttcgtgctgaagcacgccgacgcgcccgtgctggtggacggcaccggcctggacgcgctcgtctccgcaaaagggcgacgcttgctgaggcggcgcttcctcaacgggaaccccaccgtggtcacgccgcacgccggagaggcggcgcgcctcgcacgccccttcgacctgcctgtcgacgatccctgcgcgctcgccgaggcgctgtcgctcgcctatggcgtgatcgccgtggtgaaagggcccgtcacgtacctctccgacggcgagcagacggtgcgcatggcgcacggcactccggcgttggcgaaggcgggcacgggagatgtgctggccggcatgacggccgcgctgctggcgcaggggctcgaccccttcgaggcgtccgtgctgggcgccgagctgcacgcccgcgccgggttggccgccgcggcgcgctggtcgaccatcgctgcgacggcggaagacgtcgtcgcctgcatccccgacgccatcgccgagctcgtgagcgcgtcgtcctgagcgagcaggaagcgtgccaaatcccccgtcccttcgacacggtcctgagtgtgtcaaagggacgggggatttggcacggtcaggatcacggcgagatccgcggcggccgatcctaccagtggctgaccacgacgtcgcccactttgataaggtcgtacagctccaccgccttctccggcggcaggttcacgcagccgtggctgccgtagcccgacttgtaccgcgagtcgccgaacgcgggctgccaatcggcatcatgaaacccgatgtagttgtctacgaacggcatccaggccttcacctcggtctggtattccggctcgcccgtctcgggcttcatctggccgatcagcttcgacgggctctccttgccgttgattacgtagacgccctcgggggtgtcgtgctcgccgtccggcgtgccggtgaccacgtcggactcccacgcgagcgagccttcgtcgtcgtagaagcgcgcgtgctgctccgtcagatcgacgtcgacgtagcgcttgccccaatcgcgtccgtgcagcccgtcgtaggcgcccgcctcctgttcgcaagggatggccatgtcgccggtctgcgcggaacccacgccgttcgtcaccgcctcttgcagcttgcccttgtcgatgatccagccgtatacgccgcctgacacggtcacctccttgccgtcggcgcgcgtgaacgtgcgacgcgcctggtaggtgttgcacgccgaagccagatcctgcacccaggctgccaccagcccctcgtcgacgcccaccgtcacgtcgtcgtgcaagcgcacccaaccggcgatggcatcggcattcacctgcgccacgggcgtatcgcccagcttcagcgagaaatcggctttcaacaggttgttcgcctcatcggccgccttcgccagacgctcatcgtcggacagcagcgtgggctgctgcaacgcatcctcggacagcgtcgcgctcgaccccatcgcagcgacggccgcgttcaccgtctcggccaccttatcggcatcgagcgcagtgccgacggtctcggcgcgcacgacgaaccgagagccgccgctgtcgtagtcgagcccggcgttgcgcggcgcttcggcctgctcgttgaacgcctcgacggccttccgcacggcttcgtccagcttgccgttcgaagtgaccagcttgtcggtttcgtcgtgcacggtgaatacctcgaccggccaggcccacgggctggcatcggcgtgcatggcatccgtcacgctgctgctgttgacggccgtgcccatgtcggacgaggcgagcgtcagcgagaacccctcgcccgacacgctcagctggtagcttttcgccacgtcggtcaacagatcctgaacctcggcggtggttttcaacgacacgtccttgcccatgatcgtggtgttgggcatgaagcggtccatgaacacgagcgcgcccgccaggtagacgatcgcgatcacggcgacgagcgcgccgcccgcaatgagcccggtcttcttcgcgaacggaggcttccggttcgacgacccttgtcggccgccgtccgccgactccgggcgcccgccgcgaaccggccccggtcggccgccccgcgacgcgggcacgaacgacacgtagctttccggcgcgccgtcggccaagggagggtcgatcgagtcgatgcgccgcgttcgctgcggtgccgggcgcggcgctggctgcggcgccggttgctgcgcttcgtgcttgccgcgcgtttcgtgttctggcgtcaacgtgcgcctcctcgcttgccaatggctcgttcgaaccaaactagaaggttcgccgatggaattcaatcctttcactcaacaaaataaagaattggttcagacgctcgacgaagggagcggcgagacgagaccgagagcgacatgtgcgctttttcacctagcgtcggccgccgtgcggctggacgagcttgtccgtatgctctagcagcgaacacgaggcgggatggcagagatcgcgcgctatgcacgattctagaagcttgttgtcagagacaaaaaagggaaagcccaggtcgaagtacatggcgctgacgaaaaatcatgcatagcgttgaatctcttccatgcaggggaaggacgaggcacctcgacgaggagggctcgcccgtgcgacccgcgaatgcaggcgcgccgcgcgaactctcgaaacggcgcgcctcgcgcgggacgatcagtttgctggatcctcggaggccttcttcggcgcgtccatctcgtccagcaggctacgagcttccttgaactgcttcgccagctcctccatagggttcacgcgctcctcttgggcgcggaccgactcctccgtgatggcgagcgcgcaggccacggcgtcggtgtgcgtgtacgaaagcgacagcggcagctcgcgcacgccccgctcgtcggctacctccttagcgcgcccatgcagcaccacgaaggggcgacccttcgcgttgcggcgcacttccacgtcgtggttggcgatgccgcgcgagaacccggtgcccagcgccttcagcacggcctccttcgcggcgaagcgcgtagcgtaatgcacctcggggttcgccgtggactcgcagtaggagcgttcctcctcggagaacaccttctcgcgaaagctgggcgtgcgctccaagatgcggcgcatgcgggcaatttccacgatgtccacgccaagtcccaccgcgccctcgacgccctcgaacgccgccgaagccgcctccgtcacgctcttctcgctctcactcacaacaatccccaatcacccatattccaaaaaccggtttaaagactcagcatccaacctggcgattcaccgacagagtaccggcccctgcggagcgaatccgcacggcggcgtccaccaagcgagttccgcagcgcagcgaggactgtccgagcgactggacgtcgccgtgcggattcgcggtcccacaggtccccccgttactccaccgtcaccgatttcgccaggttgcggggctggtccacgtcgcagccgcgctcgacggcgatggcgcgcgcgaacagctgcagcggcacgctggccgtgatggcgctgaacgcgtcgcgcaccttagggatgtagatgacgtggtcggcatggtgccggatgtcctcgtctccctcggtggcgatggccaccaccatggcgccgcgcgccttcgcctcctgcaggttcgacaccagcttgtcgtacacggggctcttcgtggccaccgcgatgaccgggaagccctcgtcgatgagcgcgatggggccgtgcttcatctcgccggccggataggcctcggcgtgcaggtagctgatctccttgagtttgagcgcgccctcgtaactgatggcggcgcccatgccgcggcccacgaacagcgcactggccgcgtccttgcacgcgcgcgccgcctcatcgatggacgaggaatcggccaggatgcgctccacttgctcggccgtgtcggccagctcgtggaacagcaggcgcacctggtttgtcttgagcttgcccttcacctgggcaagcagcatggcgagcaacgtgagcgacaccacctggcccaggaacgacttggtggaggccaccgcgatctccttgttggccttcgtgtagatgacgccgtcgctctcgcgcgccacgggcgagcccaccacgttcgtgatgccgaacaccttcgcgccctttacgcgcgcgtcgcggatggcggccagcgtgtcggccgtctcgcccgactgcgacacggccaccaccagggtggacggcgtgatgatggggttacggtagcggaattcgctggccacctccacttccgtggggatgcgcgcccaaccctcgatgaggttcttcgcgatgaggcccgcatgatacgacgtgccgcaggcgatgacgtacacgcggtcgataaggttgagctcctccagcgtgaggtccagctcgtcgatggacagcgcgccgttcaccaggcgccccgccagcgtgtcgcggatcacgcgcggctgctcgtggatctccttcaacatgaagtcggggtagccgcccttctcggccacatcgagatcccagtcgacgtgcgtcacctcgggctcgtacgcctcgccgcgcacgttgtagaacgtgacggcattcggcgtgagcttcgccatatcgccgtcggcgagcaccaccacgtcgcgcgtgtcgtcgatcatggcgatgatatcggaggccacgtgcgcgccgtcctcggccagccccaccacgagcggcgagtccttgcgcgcggccacgagggtgccgggctcctggtcgctgatagccgcaatggcataggcgccgatcaggcggtcggcagcctcgcgcacggcctgcaagaggtcgttgctttcgcgcaggttctcctccacgaggtgcgcgatgacctcggtgtcggtctggctcgtgaacgtatggccgcggccttccagctcttcgcgcagctcggcgaagttctcgatgatgccgttatgcacgacggctacgctgccgtcgcaggaggtatgcggatgcgcgttcgcctcgctggggcggccatgcgtggcccagcgcgtgtggccgatgccgcaggtgccggtcagctcgaggggctcgacgagctgcgcgaggccgctcaccttccccttgcagtgcacgacttccagcttgccgtcctgctcgacggcgatgccggcagagtcatagccgcggtattcgagtcgcgacagaccttcgatcaggatgtccttgacggggcgcgttccggtgtatccgacgattccgcacatgattagctcctttgtgctcgggttcgccgatagtgtagcgcaccgattccgcatgcgcgaatgcatgtcggccgaagtcgcgcatccgctcaataaacgcatctttctcgtcaacgacggaatcggcggcgcatgttcgacaagccggcctccgcgtccttcgaccccttggccagtttcgcaaggacgagcaggagattgagcgggtacatcagaacgaggattttccaaacaagccccgtcccaaccgtgcagaccagcccgaacgtcgtcgatgatacgatcaaagccgaaagcgccgccatagcctccgaacccggcgacgcggccgatttcgatcggaaacgagccgtcgcataccagaacaggcacgcgagcatgccggcgcccacgaacgtgcgcccagccgtcgacaccgtttccatgcgagacgaatccgtcagacacgccgcgcacagcagcccgaacgccccagcgacgatcgttgccgtctccatgcgcccgctggccgccatccgctcgcgatcgacaggcagagccgccaggaagtaagcgttcagcagtgcgcaaacgaaagggtaagccgccagggacgccaagatccatgtagcgaagaacaggtcgaaagaccactcggcaagccagcttccctggatggcgcacaggggcacggcggccaagaagctcgccgccaccgagaaggacacgaccccttcgtcgaccatgcgaaaaaacagtgagagacgagccgtgattcctccttcattcaagaatgacagcctggaatggtatcagtatttttatcgtttgatgataagaagccggcacttccggcgaacggaacccttactctcccccgagatccaaatcaatctcgtacacgcgctcgggggcggtccgcctcaagcccgccttgacgcgggcctcccccgttttacgacgctcttcgacgaggcgatcgaactcctcatcggtgacgatcttcaggatatcgcccggctggcaatccagctcgagacagatttccatgagggtgtccatcctgatgccgcgcatcttcgcctggcgtatcctggacacgttcacggtcgtgtgcccggtggcgcgcacgaggtccttgctgcttttgcccttctcgagcagcaccgcttccaattcgactatcaggtgcttcgccatattcaagcccctacaggtaatcatccgaatcggcctgcagcaaagccccgtacttccaaacggaagagagcgagaagcaaacgacagccccaacgacggatttgacgtcgatggaaataaccgaatagttggccgattcatccgaagcaagtcctatatgaaacccaccagcattcgcaactgacacaaaaccggacgatatcaaaatgccgagaacaaatcccgtcaaaaacagccaagcgatgattctaatttgattagcatgggcaatggtgaagggcgaacgaccttgtgctacatctttcgcgatgcttctcatgaccaaaagaatcactccgtagatcgcaaaatcgagaaggctcaacgtcagctgcatgaggtaagacacatcgagagcttcgcccgaacctgcgaaatcacttaccttggccactaaaaacagcgctacgaaaacgcaaacgaagacaaaagcaaccaagaacaagcaactaagccttgaaccaagcacttcgagcttagcgagagctttctctatcttccgaatgcttttcgtcacgctacttgccgatctctaataattgccgaataagtagtcaacccactatcgaagtaccgcctacgctgcaccttccacactgcttaaactgcagccaggtttggtttttcctgaggcatggagctaaatccaagattgaagcagagactgccaaagccgatcagcgcgcaagtacccaacgtagacccttcgctgtagaacaacatattcatttctcctttcaaatgttgactattctgatccatgttcacattctacgatatgaatcgacacgaagtacagggcaacaaaaaattcgacatcgcgaacgatgccgaattccgaaccgcttacgctctcgccacgcctaccccaacacccccggggaggcgttggcgtgtcggacgaaatcgacgatacgcgcgatgaaaccgtttttgcctccgatcgcctgtgcccctgcgcgctggtgagacggcgcgcccagcagcgggctctcgtcgccgatgtagtacagcgtggtggtcagcaccatgccgatcagcgccactgcctcgaacgctggatcgatctcggaccggatgaagccctccctctgaccgcgcgccagctgaccctccaacacgtccaacaagcgcccctcgtagtcgcgcatggaccttgaccacacgcgaccctcgcgccacagctcggacacgaagaagcgcccgaacgccttgttctcgaaaatgctcgtggcgaacagctccaccatgccggtaagcgcctcgggcgcggtgggagcctccgcagcgatgcgctcgaagccctcgatgagcccgccgatcccctcttccaggatgctctcggccatgacggccttgcttttgaagtgataatacgccacgcccttcgatacgccggccgcatcgactatctcgttgaccgtggccgccgagtaccccttctcgccgatcaccgccaacgccgcttcgagcagctgcttgcgcgtcgcgcacgctttctcggttcgcttcgttcccatcatcgcatcacccccgcggcccggcgtccgtcgccgggccgttcgtctgtcattccccagtgtagcaggtcggaaactagccgagctgcagcaccggatgcaagtcctccatacgcaccgtgcgcttgcgatacgccacaagacacgtcagcgcgaagcacgcagccccgattgcgaacaacacgaagcagtcgaagcccacgatgccgtaatccaatcccgtcatgatctggcgcatgccctgcaccacgtacgtcatgggcatgtacgggttgataacctggaagaagtcgggcgtcgtctggatggggaacgtgcccgcgcaagccgtcagctgcagcataagcaggatgatggcgacgaacttaccggggaacccgaacgccgccataagcatctgcatgatggccgcgaacacgagagccgtgaggtagcccatagcgtagaacgcgggaacgttgtcgatttgcagctgcaggccgaattgaagcaccaccatgagcagcgtggcctggatgagcgagaagaacgccaccggcaggtagttcgagaacgccaccgtgaccggattcgcgcccgacatgatgaggcggctgttgagcggcttgaacacgaaccctgccacaagaccgcctacccacagacccaacgccatgaagtacggggcgaatccggttccgtagttcttcacggtggtgtagtactcgttcgcaagctcgacgggatcgctcatcacctcggacttgccgtcgatgttcgtcgtctgctcggcggcggtcttcgcgccgtctgcgagggcggtggacaactcgccggagccgtccactgcgtcggtcagacccgaagcgagcgtaccgctgccctcctccaactgcacggcgccggaagcgatctgcgcagaaccgtccttggcgctttgcgtgccggcaaccagctgacccgcaccgttcttggctgcttggacgccatcgacaagctgcgccgctccgtcgtcgagctggttcgcacccgacaccgccgaggacgcgccgtcgttcacctgcgaggcgccggacgccaccttcgaggagccggctacaagcgaggacatgttggcgttcacctcgttggcgccggcgtcgatgcgaccgatgccggcgacgagctcgggagccgcctgggcgagctggctcgcgccggcggaaagatcctggaggtcggaggatttcgacacgagggaatcgcgcatctgcacgagaccgccgttgacggcctgcgctcccgccagaagcgtcggcgcgttgtcggcgatcttctgagcgccgggcgcaagcagggtgtcggtcgagtacttcgcctgccccagtccttcgacgacgcccgtttgccccccagctccgtccaggtacgcctgcgccgtcccgatagctttgagaagcgcttccttatcggcggggctcatatcgcttgccatgatcgctgctttatccacgcccgccagagacgagcttgccgcggaagctcccgcctgcaagttgccgagggagcccgacagtgtttctatgccagccgccaatgcgggcgcgcccgtctgctcgttcgccaagctttccagcccgccgacgagggcggtcgacccccctacgagcgttttggagtcgctttccgacccgagcgaagaaaccagatcgcccatgctgcccactaaggattgcacgccgtcgttcagcttccccgcctggacatcgagtcctgcagtctcgtttgccagctcgcttgcgccggcggcgaccttgctggtgccgtcggactgcagcctgccggcgccgtctgcgacgccgctcgcgccggaggcgacctggccggcaccgtccttcagctggttcgcacccgctacgagggattgcgttccgtctttcagcgcgaacgtgccgccggacaaggtgcccaagccgccgtcgagcgacgatgcgccggagacgaggctgcccaggccggtgtccagcgtcagcgcgccgtccttgagcgtgccgagattcgacatgatggcaacgcttccgtcatgtgcggtgatcaggccgttcttcaaatcgtccgcaccgtcggcggccttctggatgtccttgcccgaatcggccacgcgcccgagcacggtcgtccagtactcggcggccaccgtgtcgctcacccgcgtgcgcacttccttccacaccgtctcgccgatctgggacgccaacatgttctcgctctggttgtagtcgatcttcaactgggccttctcgggtgcggagccgtcgaccgaggcgatgctctcagagaagtcgaccggaatcgtacacgtcatgaagtactcgccgtcctcgaggcctttccgcgcctcgtcggccgacacgaagtgccagcccaggccgtcgtcggtatccttgagctgctgcaccacatcgtcaccgaggttgcgctgctcggcggcgatcaccgcgcccctgtcctcgttcaccacggccacgggcaccgtgttcaggcgcgcgtacggatcctgaaacgccgccagatacagcgcgccgtacagaagcggcatgatggctatggcggcgatgaccacccacatgatcttcgatgccgtgatgttcttccattcgaggccggcgaacctgagtcccttgaacgccatgagctactcaccatccttcgacagatacaccgtcgcgtcggccatggcggccagatcgcgctccaccactcccacgacgacggcgacgttgcgcgtgcgcgccgcatccagcagcagatcgacgagagcctccgactgcgacatggtcagctggctctccacgtcgtccaccaccacggcatcgggttcgcccacaaacgcaagcgcgatacccagctgtgcgagcttctgcgatgtgagatctttcacgcgcacgttcgccacgtcgcccagctgccactgccgcaggtaatccgtaaccgcctcgcggcgcggcttacgaccgtacagctcgaactcggctcccaacgcatatgccgccgtcaagctgtcctggaggtcgttcaacccgctgaacaaccccaggcccacgtgccgctccgccttcgagcgctggcgcggcagctcgaattcgcccacgttcaacgttccctccgtctgcttcatgcggcccgccagcgtgagcagaagcgccgtctttccgctgccgttgcgcccgcgcacggcaaccagctcccctttgtgcacgtcaacgtccacttcgcggtacgcgtatcctgcgtacgtcttcaaccccaacccgcgtgcgctgatgtacggtgcgccggcgaatgtggcgccctcgcgcacgaacgtgcccgattccggacgcatctgaagcgcgtccgcccccttcgacggcggcttcgctccatccacccacggctcgatggtagccggcttctcctgcatgcccatcacgtccttcgcgtcgttcgtcagccttcattttttgactgactagtcagttttgtatcaaagtatagcacctgcgccggaaggcgcaagcgtttcgcgagaaacgcatttctagcgcgcttcttatcgaggcacgcacccttgccgcgcctcgtcggcagtccacgcgtcccgcacggtcgcggctgccgccgccgcgacccagcgtgtgcggaaacgcgaacgacgcacgaccgatcgacggccctacttatacaagaacaaatgtttcacgtgaaacatcccgggaccttcattgccccccccccgacaacccgccgcgacagccggcgcgcgataacaaccggcatgcgactacgaccggtccgctgcgacgaccggagcgcgacacgaaccgacctgtcgtggcgaccggagcgcgacgacgccgcttttcccgagcgcgcgcgaaaacggctcggctccatctccacttcacccccatccccatccctattccccgtccccaacgagtcaacgcttcgacgcaaaccatgcgtacaaatgtttcacgtgaaacatccgggcagcgccgcccccctccggggtttcgtcgcgaagtcgatccgcaaccgttatctcgggtatacttccagcgaacgaaccgcgcgcggatgcgcgcaatttcgcgcagaaacggagctgccatgaaagcgaagatgatccatcgctgcatccacgtcctcgacctggacgcgtcgctcgcgttctacgaacgcgcgctgggcctggccgttcagaggcgcatgggacccgacgacggatcgtgggaaaacgtgttcctcggcaacgaaaagaccgatttccaggtggagctcacgtggaaccgcggccgcaccgagccctacgacaacggcggacgcgacacgcacctggccttcgaggtggacgacatggacgccgcgcgcgccttacacgaggagatgggctgcgtgtgcttcgtgaacgagcgcatgggcatctacttcatcgaggatcccgacggctgctggctggaaatcctcccagcagatcgcgcggagtagcctcccgcacccttctcgcaacatcgaggcatccagcctccccattccccacaatcctcatgacaacgggcggcatccgcgcaaggcgggtgccgcccgcacttttgaaacgcgttggaatattcggcaacgcacgggtaaaccgcgttggaaacggttgcacgaaacgtggaaaccgcgctggaaacgcgtggcagttgcgctggattcgaaggtgctccgcgctggacgcacgccatcaaaacgtaagaccaggtcgttatcatggaagcacggtaaattgcagcggcgccgccatcggcgagacagggaacggccatggctcggcgccgctgcaaaccgtacgaaacgcgacgggcggaaagcatccaactcggccgcccgtcgcatgaaacccttacgcaccgcacgagcttgctaaattataaatagtattgacaataaaagggatcggggataggatggtcaagcgcagagaggtcgtcaggtttttccggcagaacggcttcaagaacgaagggggcacgaatcacgacaagttcaggcatcccgacggcagaagaaccgttatcgagcgacacagcgagatctcaaaccagcaatttgaagtcatgaaaaaacaggccggactcaaatagcccaccccctccgaaggagacgagcatgaagcacgtgtacgagtttgaagtgttcctcgatgagggccgctacaccgtctggcccttcgatttcgagtgcggcggcacgtcgggcgccacgtttcgcgaagcgtgcgagatggcggtcgattggctgaaaaccgtcgttgaggattacgcgatgcacgacgaggcaactcccgagcccaccttcgacaacgagccgcgctacggcggacggatcatcaccgtcgccatcgatgccgggctggaaaccattccccgcatgacggctgccgaagccgcgcgcgccttgggcgtgtccccctcgcgcgtcagccacatgatccgcgacggcctcctcgagtcgttcaagtacgggcacaacacctgggtgacgggctacagcgtggaggcccgcctgcgcgagcgccctcgcgcaggccgtccgaagcgcaagcccgccgccagcgcggaagaccggccgcaggcgctcgaagcctagccggcccgtccctcgcaccccacccccgaaaccgaggagggagccgcaccgcggctccctcctccactctcaaaccctcgacggatcatgtcgcaagcgcgctagttccccgcagcgcgcgcagcctggtaggcttccaccagcttcttcgtcacgtcggccggtgccggctcgtagccttccagctcgatggagtacgaccccgagccgcgcgtgatggcccgcaggtccttcgtgtacgtgaccacctcggcgtaaggcacgcgcaccatgatgaccgtctcgcccgcgtcgttcgaatcggtgcccacgatgcggccgcggcgcgtggagatgtcgcccatcaccgcgccggcgtactcctcgcccaccgtcacgtcgaggttcgccatcggctccagcaggatagggtcggccttctcgcacgcggcacggaagccgatgcgcgcggctgtcttgaacgccatctcgttggagtcgacggagtggtacgagccgtcgtacaccgcacacttgatgtcttccataggatatccggccaagaaaccctcacgcatggcatcctgcacgcccttgtcgatggccggcaggtagccgcggggaatcttgccgcccactatctcgtcgacgaactcgtagcccgctcccggattcggctcgatgcgcagccagcaatcgccgaactgccccgcgccgcccgtctgcttcttgtgacgaccctgcgcctcggccgtcttgcggatggtctcacgatacggaatgcgcacggggatgagcttcgcctccacgcccgtctgctccttgagccgggcgatcagcgtctcgatctgcgcctcgcccatggccgtgatcaccgtctggtgcgtctcttcgctacggttgatgatcagcgtggggtcgttctcggccgcgcgagccaggaacgttcccagcttgtcctcgtccttcttgttcgccgcctcgatggccaccgggtactgggggacgggcagcggcaaggggtcgatggccacgtcgcccgacttcgacatcgtgtcgccggcacgcgtatcggtgagcttcggcaccacgatgatgtcgccggccttcgcgctcttcacgtcggtggcctccttgcccatcatcacgtagaggtggcccagccggtccttcttgcctgtgcgcgcgttgatcagctccatgcccggttccagcacgcccgagatgaccttgaggaagctcaagcggcctacgaacggatcggacaccgtcttgaagatgaacgcggcgggctcgcccgtctcgtcgacgaacgtctcctcgccgttggccagacggaagcgcccgtgatggcgaggatgcgggaagtaggtggcgatgtcctccatgacgccctggatgccctgctcgatgatcgtggagcccacgaacacgggaatgaacagctcctgcgcgatggccttgtccaacagctgctcgagctcgtcttgggtgagctgctcctcgccgtccaggtacttcatcatgagatcgtcgtcggcctcggccacgaggtcgcacagcttgtcgcgcgcggcttgggcggcatcggcgtactcgggcggaatctcctcgatgcgctccttctcgctgccggcatcgaaatagcgcgccttcatgcgaatgatgtcgatgacgccctcgaagtccttgtcgacgccgataggaatggtcaccggtcccagacgcgaaccgaagcgcgcatgcagcagcgccatggccgtgtcgaagtcggcgttctcgcggtcgatatggttgatgaacacggcgcgcgacagacgcatgtcctccgcctcgcgccacagcttggtggtcatgacctgcgggcctgccacggcgtccaccacgaacaacgccatctcggccgcttgcatggtggccagcgtgtcgccgatgaagtcggggtggccggacgtatcaagcaggttgatcttgtagtccttgtacggaatgggggcaatggaggtgccgatggtgaatttgcgccggatctcctcatcgtcgtagtcgaggtaggatttcccgtcgtgcgtcgtgcccatgcggggcgtacggccggagacgtgcagcatcgcttcggcgagcgatgtcttgccggcgccgtcttggcccaccagcacaatgtttcgcacgtgttcggtagcaggagctgccatgttgaccaccaactttcgtgttgcgtggcccacgccgttgtcgtttctgccaaggcgcgaaccacagtcgagcctaacctacgaacttcaaacgcgatcttgaaaccttgacccatagtgtatcgcaaaacagccgctttcggcgtccacaacgacggaattaggcgggctcggatcacgctcccgatgcccctcgcatccatctttgaagaagccgcgagcaacacgttaccgaacggtgacgaactcgtagccgcgggcgcgccgcgcgacatgcggttcgcgcagcccgtataatcgaagcagacacgcggcacgaaaccgcaccccaccgtaagcgaggagaccatgagcgacccaagccccatcatcgacgtcaaccccgtcgcaagcgccagcgacgccgcgaaaagcgcaagcccgtcgggcagcgacacgttccgcgcgccatcgtacgggaaggacgccgcgcaggccgccgttaacgccactatcatcgacgaagggcgcgtctcgaagaagaagcccaaccgcatcggcggcgccgtgcagacggccatcggcggcgccatcatgctggtaggcgtgcccatgctcatcctgcccggtcccggcttgctggccatcggcggcggcgccgtcatagcgggcaacggcatcaagaaggtgctggggaagtaaaccggccgcagcagaaacgaagcgggcccatcatcgcgatggccccgcttcttcatttcggaacagcttagaacgagagcgtctgcgccgcgtctggctcttcccgatactcaccgaacgcagagcggtaactgtagttcgtgagcccgcgcagctcatcatcgtctgcggcgtagtacgacaccatctggacgaactcgccggtcatatagtcgtgcttgcgatacatgatgcccgaatggtagccggttcccgtctcgcccgtctcgggatccgtccatgtgctctccaagagcgtcacatcgtcttcggaaatgagctccatgtacggtcccatagcctgccatccgtagggcttgagcgatatgctcaccgttccatcggtcacgtcccagccggtcagctcgtagccgccgaactcgctcgtctccaatgtggtgccgattcgagagacgtccacatgttgtacgttttcctcattcctcgctttacgctcctcgaccgtcatcgagtcccagtcgagcgcgttcaacatcggcgtgaacgtgacgctatgcgcttcgggcgagagattggagaactcgataatctgcgaaccctccggattgacgcccgaaccatcgccagcttcgaccggagtcaaaacgttgccctggtcatcggttaccttaagcaaatgaggactcagcacgttctcgggcgggccgtaggaagaaccgtattcgccttgctctcccgtccactcgttgtcgttgcgcacgaccatcacggtgcccagctcggatgccgtgaaacgctggatgcccatcgtcttgtcgccgtcgctcgtgttgaacacgaggtcgtgcgcgcccagctcgcgcggactggccaccgtgctcaggtcgaggccgacatcgaacgtgaagggctcgtctccttcttcgaactgcttccacatcgcatagccttccagcgcgatgtccacctggtcgggaagcgtcgcttccggcacgatgcgctccatgatcttcaccttgccgtcttcttggtacgcatcgagcacgtagacggaatctttgccgatcgcctcgccgttgctcgaaagactgtacgagaagcgcggagcaagccgctgcaagcgcgcccattcgttttcctgggaaccctcgtagttcgactgctcggtcaggtcgaagccgccctccttctccaacgtgaagaacaggttgacgatgttgcgatcgcacgacaccgaatcgagcgtcacctgcacgccgtcgacttcaacggtatcgcccacctcggcgttcaggctggaaaccccgggctgcaagctgttgtatatgggcaggttgttaccgcccccgaaaaatccgacatcgcccggctgcatctgcaccaggcgcgacgcggcgaaggcgacaccgctcaacagcacgacgagcacggccgcaaccgccaccatcgcaccgcggcgcgccacgctggcgcccttgcgcttgccgtgcgcaggctcggcagaccgccgcttgaccggctgccgacgctgcggagcgcccgcgcccgacggcgtgggacgatcctgaggaatggagcccagcgacgcgtacacgccgtcgagcttgacctgcacctgcgggggaatcgagcccgcgtccaaatcccggatcaccgcccggcgcagctcgtcttcgttgtcgaacctctcatggctcatcgcgccacctcaacttcctcgttcgagccttgcgaataggcaaccttgaagcggtcccgcgccctcgacagacgggtgcgcacggcaccttccgacacgttcatgatctgggagatctgtcgcacagggaaatcgttcacgtagaacagcaccagcaccagccgatcgtcggccgacagcgaggcgatggcgtcgcgcacgtcgagcgcctcgtcgcggtcgggatcgcgccgcacacccgcgcccgccagcatctggcccgccgacggctcccaccatacgcccgagccgtccacgtccgcggcgaacagccccatggcgcacggcgtctcgcggttgcgctgacgacgcatgtcgtagcagacgcgcagcaggatgcgcatgaaccacgtgttcactgcgctgcggccgccgaaacgcggcatggcgcgccacgctttgaccgccgtctcctgcagcgcgtcggacgcatcgtccacgttgccgagcaccgccatcgcagcgcgccacaacggctgcttgccatactcgaacagcgtggcgaacgcctcgccgtcgccgtttcgcgctcgctgtatcagatcgtccacgcgggtgcccctttcaaggtcggttacctattagacgcgccccgacgcgaaaaggttacacccggttcaagaaaattcgcccgatgtccacgaccatgcgaagaagaccggcagcggcggatgcgttgtcgccccaaagctgcggtttcgggcaatatttcgaggctttggggcgacaacgcatccgccgagcccaaaaaccgcacatccacggcgcaagccgctacagcgggcgcatgcgcacgctcatgtcgaggggcttggcggagaagggcgccgtggtggccaggccgtccacgccggttgccgcgtacgcgcccgcgttctgcgggttcacgccgccggccgcgatgagcgtgacgtgcgggtcgatggcgcgcagctcgcgcacaagcggctccagctcgtcaacggggaccttgtccacctggatgccgtcaacgccagcgcgcgccagcacgcgggcacgctcggcatcagcctccacaaacagcttcttctcaacgcagcggcccttgatatccggcagctgctccacgaacgcctcgaagccgccgaagaacgtgaggtgatggtcgaacaccagcaccgtctcggacagccccagccggtgcgggaacgcccctcccgccatgacggcctcggtcatcaggtctttcgcgcccggcatgctcttgcgcgtggtcagcacctcgcagcgcgggttcgccgcgtgggccgcgtccaccatcgcacgggtcttcgtggccacggccgacatatggtcgaatacgttgaggcacaccttccacgccgcatgcaggtcgcccgcggtgccgcgcacgcggaagaacgcctcgcccgcagtcgcgcgctcgccgtcgcgacgcgcctccaccacgtcgcagcccagcttccccatgatacgcgcgaccacgttcgcgccggccagcacgccgtcttcgcgcgtgaagtactccatctcgcccggctcgtcgccgatgcccagcaccgcgcacgtcagatcgacgtacggcacgtcctccgcgatgaacccgtcgatgcgcgtatcggaaatcctcagcatgccgccccttccctcttcacgattgtatccatttcagaatagaccaacgcgcccgccatgcctagccgcactttgcgcacaacaccgcgcgaaaatgctttcacccgaaacaaaacgaaccgatgtttcacgtgaaacatgcgcaccgaagcgccgagaacgtgcgaaccatgtcggaaacggcggcaaggcgtgtggaaacaacgttggaaacaggggcaaacggcatggaacccacgtgggaaatgcgtgagattcgcagcagatcgagaaagatccgcgctagatgcacgccatctgcacgtaagacgagctcgctataataggaggcacgaactcgccagacggggaggatagcaccctctttacatccatttccgaattctagataaacggaagggggtgtcctctatggatggcatattgctggatcttatcggggtgatcttgcaggttctcggcctcatcgctgccttcggcagcctgacggtcggggtagcctcgctcgcacttcaagcgcggctgaaagatacgccccggtcgtcccaaaaggacgaaccgggaccaaaataaacatccgaaccgccgaagcgagtccgagagccgtggggagtacccgctccctgcggctcgcctgccagtatacgcaaaggccctccgtcaagcaagccgcccacccggcagcgctcgccctacagctcgccgatgatgcgcttcgtgcgagcctcgacctcggccttcgctcgctcgatgtccagcgtgggccactcgccctcgcgatacaccacgaccccgtcgcacatcgtcaggcacacgtcggcgccgtgtcccgcgtacacgacgttcaccagcgggttcgtcatcggcgcccacgacggccccgacgtgtccagcacgcacaagtcggccttcgcccccacggccacgtacccgcagtcgtcgcgcccctgcgaaagagcgcccatgcgcgtagcggccgtaagcgcctgcttcggcgtgaccacggccggatcgttcgtcgaccccttcgccgtcagcgccagcaggtacatatcctgcatcatgtcgtggttgttgttcgacgccatgccgtcggtgcccaggcacacgttcacgccgcgcgcgagcatctttgccacaggggcgaaaccgctgcccagcttcatgttcgacgccgggttcgccgccacgaacaccccgcgctccgccagcacgtcgatgtcgccgtcgtccacccacacgcagtgcgccgccgtcacgggcacgtcgagcacgcccaggctctcgaagtagcgcaccggcgtcaaaccgtcgtggcgctgcttgcactcctcgtgctcgaggcgcgtctcggagacgtgcacctgcaaccgaagcccgtgctccttcgcgtacgccgccaaatcggccacggcgcgcgggttcgacgtgtactcggcatggatgttgcagtccaccacgatgcggccatcgcctgcgccctggacatcgcggatgagacggtcgaggttccccttcaccggcaggtcgtccaacccttcgccgttgaaggcaagaagcgagtcggacaggttcatcttgatgccggcgtcgagcgctgcgcgggcgccctcctccatatgatagtacatgtccgagaagctcacgcagccgtaccgcgccatctcggcgcaggacagaagcgtgccccagtagcagtcttcgggcgtgatcttcgcctcgaacggaaacaccatgtcgttcagccacgcctgcaaaggcaggttctcggcgtagccgcgcaacagcgtcatgggcgcgtgcgcgtgggcgttgtagaacgcaggacacaagagcttgccacgtccgtcgtacacctctccgtacctcgccgcttcctcgcccgccggagccgcatcccccacgtaggcgacgcgcccatcgcgcacgcccacccagcaatgggagcggaaatcaaggttctcatccaacaggtcgatatcagcgaacagcatgcgcgctcctccgtctccgcgcgcgcccggcgcgcgggtcgattccttccacctaagtataaagcttatgctatcatccaggtgagacgagtggcgctcccgccgcacgggggcgctgaaaacccagaaagaaggaatcatggcagaagaatgcgcgcacgagtgcagcagctgcggcgagtccggatgcagcgaccgcaccgcccagggccccagcaccatcgagacgaactcccgctccaacatcaaacacgtcatcggcgtcgtgtccggcaagggcggcgtgggcaagtcgctggtcaccagcctgcttgccagcgaaatgcagaagcgcgggaagaacgtgggcatcctagacgccgacgtcaccggaccgtccatcccgaagaccttcggcatcacgaacccgctgaccgccgacgccgacggcatcctgcccggccagacgcaaagcggcatcaaggtgatgtccaccaacctcatgctgccgaaagacgacatcccggtggcctggcgcggcccggtcgtctcgaacgccatccgtcagttctacagcgagacgaactggggcgagatcgactacctgttcgtcgacatgcctccgggaacctccgacgtgctgctcaccgtgttccagtcgctgccggttgacggcattgtcacggtatccgctccgcaggagctggtggctatgatcgtgggcaaggccgtgaacctcgcgcacgacatgaacgtcgagctgctgggcctcgtggagaacatggcctacttcgagtgccccgactgcggcaagcgccatcacatcttcggcgatccgcaaggtgcggccgtggccgagcgctacgacatccccgcctacgccacgctgcccatcgaccccagcttcgcgcgcctgtgcgacgccggaaaggtggaggactacgacgtagccggcgcgcttgaccccatcatcgcgcaaatcgaggccgcgaagcaggactagcgccgcatcgggtgcagccgtcaagcaaaccgcccgcagttgaaagcctctccggaaccccggagaggctttttcacgccgggaggccttacggatgcgcgtcgaagtaacccgtctgaccgcgcacttgccaagcgcacacggctagcgcgatgacgaacaggccactcacaagcgaggtgaggtcgcacgtgcccgcggacacgctgctggccagcgcccacgccgtcaacatcgcatcgacgaacgtgatccagaagaacagggtgatcttgcgcggattccgcgctccgcgaaggccgaggaatccgatggccaggttgaggcacgctcccgccatcgccatcgcgcccacaacgggctcggccagcaccgagggctcgacgtcaagcaccatgcgcgcgaacaggtaagcaccccgcaacgcagcgcccaacagcacttccgcgatagcccacacgatcacgaacaggcagagacgtcgaagccacacctgccaaatcgtcataggagcgccgttttcgcccaccgactgaggttccgcacggctatctgccgcctcgaccatatccttcaccccgcttgccgtcatcggacgcaatgcgtgcacaataaaaaaacgacggatgcatcgcatccgtcgtagcaaatatggtggagcctagggggatcgaacccctgacctcatggctgccagccatgcgctctcccagctgagctaaggccccgtaaaagtgcgaagcctagtataccggaagaggaaatccggtcaagcacttttttcgaaaaaaaaatatgcaaccgctcaaagaggaaaataaatcgatgggagccacgctgaaccttgaccttatcgcaccacgtcatacgcaaaaaaagcgcacacgtcccccgacaagtctttctgagaaggccatgcatatggtaaggtaagttggtatcaaccattcttagacaccgtcacatcgatcggagcgaagcatagtaccggcaagaacattcagcccttcacggcttcaaccgatgatgtttgcctgggcgttcgtcatcgcgttcacctgtacggtcgcaacgaccacgcatcccggatcctcgcgggctttcgccgacgagttcgccacgttcggcaagcgcgtcgtgaccgtcgcctacttcgaagacggcgactatatgtccaccgacgaagaagggcgctacgttgggtacaacatcgagtatctcaacgaaatcgcacgctacgccgactggacatacgaatacgtcaagtaccctagttgggaagaggcctgtgccgcgcttgaagcgagcaaggtggatctgcttcccatggtgtactacaccgaagaccgagagaggcggatgatcttctcggcatcatcgctctgcgagatttccaccacgctcaacgtgaggctcgacgacacgcgttacgcctacgaggacttcaaaacgttttccggcatgcgcgtgggcgtgatcgcgaacagccaggacgccgaagcattcgcacaatacagcgagaagaacggcttttcggcggatatcgtggcctacagcgctaccggagacctgctgagagcgctcgacgaaggagcggtggatgccattgccatcacatatctcgggacgaattcgcgcttccgaaccgtagctcagttcgcccccgagcctttgtacatcgccctctcgcccgaacgcaccgacatagccgatgagctcgacagcgcgatgagccgcctcaaactgcgcgaccccgacttcgccacgttgctgtacgaccgctacttcggcatcaacaccgaccaggatcccgtcttcaccgaagacgagtacgcctatctggcatcggctcccaccctgcgcgtggcctacgattcgtatcgcgcgccgctttcctacaccgaccccgaaaccggcgcgttcgccggcgcggtcgcattgctgttcgaagacatcgcgcagatcaccgggctgaagttcgaattcgtggctgcggactgccacgacgaggccgtccgcctcgtcgaacgtggcgacgccgacatcgtgtacgacgtcgatcgagaatccgacccccaggcgatcaaaagcctcgacaccaccggcccctatctgcgcgaccccatggcccttgtcgcaggaccgaatccatccggttcgcgcgtcgcgctgccaagcggcttctcgctcgccgcgagcacggcgtactcttcgtacgccgaatacgacatcgtgtactgcgacaccccgaaagattgcttcgatgcagtgcttgaaggcaaagccgatatcgcctttgccgatacccacgtggcgaactacttgctggcggaaccccaatacgagagcctgagcgtcaccaccatcacctccttcttcaacagcatgagcatcggcgtaagccgcaacgccgaccgacgactggtgagcatcctcgaccgctgcgtgcagtacactgccgaaagcaagatgaccacctggctttcgcaaagcagcctcgccgtacatcccatcagccctttcgacttcttgcgccagtatccggtgcaattcatggccggcatcgtcgcactgctcggctccgtgctcggcgttgccctgtacgtcagccatgtgaagcttcgcgcggcgcggcgagtggaggacttctcgttcaccgatccgctgaccgaaggctggagtctcgcccgcttccgctccgaggtgggcgctcagatggcgaacgcccgcgatggcgcttacgccatcgtgtacctcgacgtaaaaagcttcaaaggcttcaacgcagcgttcggctacgccacgggcgatcgcgtgctgctcgacctcaacggcacgctggccggcatgaaagcacccgacgaacgatacgcgcacgtcatcgcagacgaattcgtgctgttggttcgctggagaggctgggacgcgctgctggagcgcttcgatgaactggatcgtcgcttcaacaacaccgaaacgcttaccgagctatcgcaccggctcatgctgcaggccggcgtctgcatcatcgagcgcagcgccgaaacgccacgcatcgacgtgcaaaccatcatcgagttcgtggacgccgcacgctacgcccgggacagcatcggggaggcctcgcgcagcaccgcagcattgtactcggcgagcatgaaggatcgcgacatcgccgaacgcgcgctggtagccgccgcgcacgacgcgctcgagcgcggggagttcacggcctattaccagccgaaggtggaaatagcgacgaaccgcctcgtgggcttcgaagcgctcgttcgctgggaatcgcctgaacgcggcctcgtgccgcccgacgagttcattcccctgttcgagcgcaccggcctggttgtcgacttggacttgcaggtatttcgtctcgtctgcgcccgtatccgggagcagctggacgcgggagaacacccgctcgtcatcgcctgcaacttctcgcgcttgcacatgcgaaacgacgcgttccctgaaacggtgaagagcatcgtcgacggattcggcgtgcccatcgagctgctggagctcgaactgaccgagaacatcgtcatggaagacctcgaacgcgccgaacgactgtgccgccgtttaaaggatctgggcttccgcatcgccattgacgacttcggcagcgggtactcgtcgctgggcacgctgcagaacctgccgatcgacgtgctaaagctcgaccgcagcttcctcatgagcagcgagagcggcgagcgctgcaaggccattctggacggcgtggtgtccatcgccgacaagctggccgtaaacgtggtggtggaaggcgtggaaacgcgcgatcaggcgtccatgctcgtgcgcatggacgatcgcatcatcgcgcaggggttcctctactcgcgccccgtcccccgggacgtctcggacgtgcagttcgccgtcggcttcatcgagccgaacgaacgcccgtagcggccacgcggttgccggaacgagaaacgggggcggccgttcacgcggccgcccccgtcgtcgttacgctttttcagatgcgtagaataccgcttggtcgaacacgtcggtcaccgacttgccgtcgatgaaggggagcgtcaagaactcgctcaccgtcggcaccagctcgctcgcgtcgacgtaatgtcccttttcgttgagcttcgcggtgtcctgcgcgcgccagtatcgatcgttgacgtcggtcaggtagtacgtctcgctgccgatctccatgtacacggagtgcttcgcgtgcaggtagttcggcagctcgtcgaaggatacgtcgagcgcctccgctgctttcgttcccataacggcccctttcgtccgaaaaacaccttggcgctatcatagcaagaactgtcagcggtttcatcggaaatggaagaatcggtcagccggttttgccggagaagaagccttctgcggacgcaccgccccgccaagccgcaccttttcaccacgagcatgctgcaggatcgctagttctgccgcacgagcttccgcatcgagccgatgggggcgaacgtcaagatagctccgaccacgcacagcaagaacacgacagccgccgtgaacgccgacgcgcccgacacgttcacgcccacgccgatgagcgcccacaggaacacgagctggaacgccatgtcgtcgtaggccttgcgcatcacgtagccgaacgccagcacgcccgccgtcaagaggatggtgaacaacccgttgaagaacgggatgccgccgtccagcgcgcgcgtgacgaggatggccatgttggccagcgtggccaccgtgacccacgcggtgtagatggacacgggcacccgtcccgaggcggtcttcatcgtgcggcgcacgttcaggtacagcgccgccagcaccagccactcggccaggatgacgatgaacgacacggccaccagctcgaagtgccacagggcaagccacagcacgttgagggcgcagcttgcgatgaacaggatggacgtcatggtgaagcggtcggcgcggacaggcgccgtgcgcgtgtacgcgacgagccacacgaccatcgccacgtagatgagcgaccagatggcgaacacgtagccggcaggcgtgaaccacgtgaacacgccgtacgcgatatccgccgacgtggtgcctcccacccggcctccttcgatgacggcattgccgatgagggtcagagcgtacacgatccacatggtgacggtctcgacggtcaggtaaccgccgcgctcgagcttgcggccggtgcgcgtgttgcgggcacgctgcacgacgctgggcgccgatgcggcgcgatacgcatgattgggcatgatgcacctcgctttctgaaagaaggatgattccgttccttttcgtcagggtgcaacccagtgtagcgccggcgcatgcacgcgccttgacggctacttagcagtactttatcgctttagcgcagatcagaagcctatcgctcaacgttgatacgcatgcgcagaaagtcgccgggagccagctcctcccccgtttcgaacgcatagcgctcggccgagcggttcgccacggcaaccggcacccgctttggctgcgcgtcgtccccgtcgggctcggggagccaggcgaggttacgcacgcgcacgcgagggacgtgcggacccggcgacagcgcctccagctcgtcgccttcgcagaagcggttgtagcaccgcgcgatcacgcggaacgcgccttcgccggccggttcgcacgcttccaccgtggcggcatgccggcattcggcggtgtagccgtccacgtcgggcgattgcctggcgtcgccgtagtagaagcccgtgccgtacgggcgatgcgacacggccagcagctcgtcggccagctcggaggagggaacgccgtccagggccagccggtaagcgcgcaccaccgaagccacgtagaacgccttcttgttgcggccttcgatcttgaacgagtcgatgccggccgcggccaagtcgtcgaggtgcgccagcatgttgaggtcctgcgcgttcatgacataggttccgcgcacgtcctcctccacgggaaagaactcgccgggacgctgctcctccaccagcgcgtagctccaccggcacggctgggtgcaatggcccttgttgccggagcggccggtgagcgcggcgctgatcaggcagcggcccgacacggccatgcacatggcgccgtgcacgaacgcctccagctccagctcgcgcggggcgccggcgcgcagtcgcgcgatgtcctccacgctcatctctcgcgcgcacaccacgcggctcgcgcccagctcgtgccatacgcgcgccgcctcggcgttgcataccgaggcctgggtgctcacgtgcagctcgacgttcggcgcgtgccgctgtgccaggcgcagcgcgcccaggtcgctcacgatgaacgcgtcgacgccggccgcggccagcgcttcgaggtacgcgggaagcgccttgaggtcgtcggcgtccatgagggcgttcagcgtcgcgtacgccttcgcgcccgcatcgtgcgcgcgagctgccgcagcgggaacgtcgtccagcgcgaagttcgccgcgcgctgccgcagcccgaaacgatcggcggccaggtacacggcgtccgcaccgaagcgcagcgcggcctccagctgcgcaagcccgcccgcgggcgcgaggagctcgggagtccttgtcgattgagttcgcatgcgccgtattgtagcgcatcgacgaacccgcgagccggcgaccaccgaaacccctcgcttcgggcgggacaacgccccctacccggcaatcctccgcatctccgagccctgcggcacattcccgggtctttcgcaccctatcgcattcccatcctggacacgagcgcgcaagggaaccccgacggcgagcgattgcacgttccgcaggcgctatgtgcggcagaatcgggcttttggcagtgcgagcccgcttcgcactgttgatttgcaaatgccgaaaaaacgcgatctggggtttcacctcgaaacgattcggagaaagacgcttctcctgccaaaaactcgattttgccgcacataaggaagagaatccgtgcacgacgacgaagggcggccaacgcggccgcccttcgagaatgttccactcgggataacgctcgccttacccctcgtaggtcacgcgcgcaccctgcggggtgtcctcgatcacgaagcccaaaccgcacaggccgtcgcggacggcgtcggcacggctccaatccttcgcggcgcgggcgtcggcacgggccgccagcagggcgtccacggcctcggcggcatccgcgccttcgtagcccgcgatatcggccgccaaccccacgacctcgggcgggtaccctcctgcggcgcacgaggcggatgcggcctccacgtcgatgccgaacacgcccataagctccacgatgacgccgcgggcatcgcgcacgggcggcacgtcggacagcgagatagtcctgtcggccgtctgcgcgttcaccgcggccacgaagtcgaacacctcgcccagcgccttgcaggtgttgaagtcgtcgtccatggccaggatgaacgccagcttcgcctccttcgtacgcttcatcagctcgcgcgtgtccagcggcgaggggatgtcctgggcgttctgcagctgccaatcgaggttcttcaccgcgttctcgatacggcacagcgccgcgcccgcctcggccaggcgctcgtcggagaagtcgagcgggctgcggtagtgcgtctgcagcataaggaagcgcagcaccttcggatcggtgaccttcagcacgtcgcgcagcagcttgaagttgcccagcgacttgctcatcttctcggagttgatctgcagcatgccgccgtgcatccagtagttcgcgaacgtgcagccgcacgcggcctcgctctgcgcgcgctcgttctcgtggtgcgggaacacgaggtcggcgccgccgccgtggatgtcgaagggaagccccaggtacttgcgcgacatggccgagcactcgatgtgccagccgggacggcccatgccccagggcgactcccacgccggctcgccgggcttggcggccttccacagcgcgaagtccagcgggtcgcgcttgcgatcctccacgcccttgccgtcggcgcgcagctcgcggtggccgctctccatctcgtctacgttgcggcccgacagctcgccgtaagccgggaacgaacgcacgttgaagtacacgtcgccgtcggcatcgtaagcgtggcctccgtcgatgagctcttggatgagctctatcattgcggggatctcctcggtggccttcggacagatatcgggatccagcacgccggccgcgcgcatgtcctcgataaacgcctcggtgtactcggcggccacctcggcagcgctgcggccttcctcaagcgacttgccgatgatcttgtcgtccacgtcggtgacgttctgcacgaacgtcacgtcgaagccgcgccacataaggtaacggcggatcacgtcgaagctgatgaacgtgcgggcgttgccgatgtgaatgtagttgtacacggtaggtccgcacacgtacatgcccaccttgccgcgctcgagcgtctcgaagtcgaccttcgtgcgggtcttcgtattgtagagtctgatcatggcgtcctcgcatcctgcatagccctggcgccgcgctcccgcgacggtgcgtttcgaccgtagattgtagcacaggaaggttacggagcccgcctgtccaccaaagtcagcgagggctttcgcagtgcttcggattggcgtgaaagaccgacgaagcgtgctcatgcacgtgaggagggcttggagcgccaagccgaggcgctacggaagcccgcagcgtcggctagtcccgttgctcgtcaggacggcggcacagcaggcagacggcggtcgcggagatgccctcctcgcggccttcgaatcccaggtgctcagtggtggtggccttcacgcccacattctccaccgcgatgcccatggcggcggccaggttctcgcgcatggcctcgcggtacggcgacagcttcggcgcctgcgcggcgatgacggagtcgacgtcgaggatgacgtagccctccgcgcgcaccttgtcggccacggcggccagcagcttcagcgagtcggcgtccttgaaggctgggtcggtgtcggggaacagcttgccgatatccccgccgcgaatgcctcccagcagcgcatcggagatagcatgcgccaacacgtcggcatcggaatgccccaagaggccgcgcacatgaggaacgtccaccccgcccaggataagcttgcgcccctcggcgaacgcatgcacatcgtatccctgccccacgcgcaacccggcaggatcgaaaacaacaggttgcatcattcggttcctccgataacgacatgcgcggccttggcgacggtgcccaccaagcgagttccgcacgagccgaaacgcccagcgggcgtttcgcgcgagcaggactgtctgagcgactgggcactgtcgccaaggcctccgcggatgatcattcttccgcccctttcatgtacatggtacgcaccgcagcggccagcatgaggtagtcttcggggacggtcagcttgatgttgtcgcgcttcccttccactaccagcacgcgcccgcccaacctctcgatgagcgacgaatcgtcggtgcccatgaagccgtccgacagcgccgaggcgtgcgcgcggcggtagatgccggcgcggaacacctggggcgtctgcgcgttccagaacacgcggcggtcgggcgtgcccacgatcacgccgttctccaccactttcagggtgtcgacggccggatgcgccaccacggcgccgtcgcagtcgatgttgcccttcaacgtggcgatggtatgcgcgatgaggtcggggctgatgagcgggcgggcgccgtcgtgcaggatgacgtactcgtagtcgtccggcacgaactccagccccgagaacgccgattcctgacggctggggcccgaaggcgccaccacgatgggcgtgacgaacgggaacgggtcgatggcgcgcttgagatactcgctgcagcggtcctcggggcacacgatgacgatgagcccgatgtcgcccacggcgtcgaacgcctcggccgaccaggtgaggatgggcttgcccgcgatctccacgagctgcttgccgccttccttgccgaaccgctcccccgtgccgcccgccaggatgatggcggccgtctgcgggttcttgtcgacctcgcccttgagccctcccatcgcctgcgacagcgcgtcgaagtcgaggtcgttcagcgcgagctcaggggcgctgagcaccgcggacgagaacaccgggtcgattgtctgcgtcataaggttttcctctccgccttgcatcgttcttgccaccgctccatttccctcgcttgccgatcgaagagcctagtcacgctcgcccggctggcgcacggtgatctcctgcgccttcagcgacacgcgggaattggggggaaccgaagaggtgacgaacgtggatcctgcgacgaccgaaccggcgcccaccacggtttccccgcccagaaccgaagcgttggaatagatcgtcacgttgtcctcgatcgtgggatggcgcttcaccccggcaagccgctgcccgccgcgcgtggacagcgcgcccagcgtgacgccctggtacagcttcacatggtcgccgatgacggtggtctcgccgatgaccacgcccgtgccgtggtcgatgaagaagtactcgccgatctgggcgccggcgccgatgtcgatgcccgtgccgctgtgcgccagctcggtcatgatgcgcgggatgatgggcacgttctgctcgtacagcacgtgcgcgatgcggtacacgtagatcgcgtacagacccggatacgagaagatgacctcctccttcgacccggccgccggatcgccgtcatacagcgcctgcacgtcggtgagcagcacccgctgtatgctgggaagctcgtcgaagaacaccgtgcacacttccgaggcgcgctcgcagatatgctcgggcgtggtgccgccgcacaggtagcgcgccgggtcgacctccgcagcatcgcgatcgtccgaggtgtacgtcatggcgagcacgatctgctcgcgcagcacgcgttcgatctgtatgagcgtctcgccgatgaagtactccggactggtgaacggcgtcagcatctcgtcgccgaaatagcccgggaacagcacccgacgcaagtccttgatcacgcttttcacggccaggcggctgggaaaccgccggccgggcttcgtgaagaatatctcgtcggcctcgtagttcttctcgatgcttttcacgatgcgatcgaggttgtctccgaacatggaacctcctggaatcgagttgatccgctgcacttcccgcagtgcacctcggccgccttgcacgtgaaagcggccgctccgcggtcggcttgcgacgtgcctagtatacgacaaatgcaagcgcagaacacaagaaacccctgctcctcgggcttcgaatttcaagccgaggagcaggggcgcttaagaggcgaagcttagtcggccgcgccgcccgagaacgagccgccggaactgacgccggcatggcccagatcgtagttcgtcagcaacagctccgcttcccgcgcgatgctgtcgcgcttgcggggcgccgggatggagcccgatccggcggtgaacaccagctcgccgtccaccgcgtccacgtcgatgaccgagccgctcgtccacgtgccttcgaggatctgctcggacagcggatcctccagcaagcgctggatggcgcggcgcagcggacgcgcgccgaacgtggcgtcggtgccttccttggcgatgagcttgcacgccgcctcggtgaggttgatggacatgttctgctcgatcatgcgctcgcgcaaatcggccaccatgagcttgacgatctcggagatctgctcgtcgttcagggacttgaacacgatgatctcgtcgatgcggttcaggaactcgggcctgaacagcttcttcatctcggccatgacgcggctcttgatctccttgtcggacagccccgcgtgctcctcggtggagaagcccagcgtggtgggctgcgcgatctcgcgggcacccacgttcgacgtcatgatgatgacggcgttgcggaagtccacggtgcggccctgcgcgtcggtcaagcggccctcctccaagatctggagcaggatgttgaacacgtcggggtgcgccttctcgatctcatcgaacagcaccaccgagtaggggcgctggcgcacggccttcgtcagctggccgccctcgtcgaagcccacgtagcccggaggcgagcccacgagacggctcacgctgtgcttctccatgtactcagacatgtcgaaggacagaagcgcgtcctcggagttgaacaggaactcggcaagcgccttcgaaagctcggtcttgcccacgcccgaggggcccaggaagatgaacgagccggcgggacgcttcgggtctttcaggccgctgcgcgagcggcggatggccttcgacagcgccgtgacggcctcttcctgaccgacgacgcgctcgtgcagcacggcttccatgcgcagcagcttctcggtctcggcctcggtgaggttcgaaacgggcacgcccgtggtcatggacaccacgtcggcgatgtcctccaccgtcacctgatgcacggacttctgggcgtcctcttcccacttcttctcggcttcgatgcgcttggccttgagctcggactcctggtcgcgcagctgagcggcgcgctcgaaatcttgggaagcgatggccgaatccttttcgccgcgaatagtgcgcagctcgtcgtcgagctcgcgcagctccttcggcagcgtcatgttgcggatgcgcatgcgcgctcccgcctcgtccagcacgtcgatggccttgtcgggcagaaagcgatcctggatgtagcggttcgataggttcacggccgcctgcagcgcctcgtcggtgaagtgcacctgatgatgcgcctcgtagcggtcgcgcagaccctccatgatgcgcatggcctgctcctcgttcggctcgcccacggtgatgggctggaagcgccgctcgagcgcggaatctttctcgagatgcttgcggtactcgtcgatggtggtggcgccgatcacctggatctcgccgcgggacagcggaggcttcaagatggcggcggcgtcaatggaaccctcggccgaacccgcgccgatgagcgtgtgcatctcgtcgatgaacaggatgatatcgcccgcgtccatcacctccttgatgcacttcttcaggcgctcctcgaactcgccgcggtacttcgacccggccacgagcgcgctcacgtcgagcgtgaacaggcgcttgccgcgcaggatgtcgggcacctggttcgacacgatgagctgcgccaggccctcggccacggcggtcttgcccacgcccggctcgccgatgagcagcgggttgttcttctggcgtcggctgagcacctgcatgacgcgctcgatctcgccggcgcggccgataaccgggtccagcttgccgtcgcgcgccttctgcgtgaggtcggtgccgaactccttcagcacgctgtcggacgtgttgccgttcggatcgaacgggttgcgcccggcgtagacggggctctgccccaccaggtcgttcagcgcgctgcgcacgtcgtcgcccgacacgccgagacgcgtgagcacttcgagcgcggtgccgtcgccctcgcggacgatgcccagcagcagatgctcggtggagatgtacgattgccccatctgcatggcctcgcgcaggctgttctccagcacgcgcttgacgcggggcgtgaaggacagatgccccgacacgtcggtgtcctcgtcgatggccaccacctggcggatgacctgcacgacggcatcgtacttcacgttgagacgatcgagggcctgggcggccagaccgtccttctcctgtatgaggccgagcaggatgtgctcggtgcccacgtagggctgatgaagcgagcgagcctcgtcctgagccaggacgagcaccttgcgcgctttgtcggtgaatttctcgaatgacatgctagcctctattctcgcagagtctatcgtatggttccgtgccatcttagcactcttgtattgagagtgccaataccgcatatgaccgcacacggctgctccacaagcgccgacggacggcccgctatccatcctaccatgtccgccgcccgcatgagcccctgccccactatgcctccaaacgtgctcgcttctgacaaagacccgaaacgtgcgtgggcgattgaaagctcggagacgcgtgcaagcgcgacgacgtgcggcgcagcgcaggcctccgaaccgcggaaaggccgcttgcgcggcatatgcgcaagcggcctttcggaagcgattatgcggcggcgctttagtacagcttggcgccggcggggatgtggtcgtcaaccatcaggaggttcaggcgctcttcgccctcctcctcatggatggccgacagcagcatgccgcacgattccacgcccatcatcttgcgcggcggcaggttcgtgatggcgatgagcgtgcggcccaccagctcttccggctcgtaataggcgtggatgccggacaggatgacgcgatcggagcccgtgccgtcgtcgagcgtgaactgcagcagcttcttgctcttgggaacggcaacgcactccttcaccttcacggcacgaaaatcggacttgctgaacgtgtcgaagtcgacctcgtcctggaacaggggctcgacgaccaccttcgagaagtcgatgggcgcctcggcaactgcgggagccgcagcggcaggcgcggcagcgcgcggacgcccgccggccggagcctcgtccctcatgtgggggaacagcagcacgtcgcggatggacggggcgtcggtgagcagcatgaccagacggtcgatgccgatgccgcagccgcccgccgggggcatgccgtactcgagggcgcgcacgtagtcgtcgtcgtagcccatggcctcgtcgtcgccgaggtccttcgcctccacctgcgcgcggaagcgctcggcctggtcgaccggatcgttcagctcgccgaaggcgttggcgtactcgtggccgcagatgaacagctcgaagcgctcggtcaggttcggatcgcccgccagcttcttggcaagcggcgacacctcgatgggatgctcggtgacgaaggtgggctggatgagcttctcctcggccaccgcctcgaagatctcggcgatgagcttgcccttgccccatgcggcttcggcgtggccgccgttgcgctcgaggatatccaccagctcgtcgcgcgtgcgctggaagctgacatcctcgccggctccttcgctggccagctcgatcatggtggcgcggcgccacgatccgctgagatccacctgatggccctgatactccacctgcagcgtgccgcacgaggcaagcgccgccgcctggatgacgccctgcgtgagctccatcatgccttcgaggtcgctgaacgcctggtagaactccatggtggtgaactcggggttatgatacggatccatgccctcgttgcggaactggcgcccgatctcgaagaccttctcgaagccgcccaccagcaagcgcttgagatgcagctcggtggcgatgcgcaggtagaagtccttgtccagcgcgttgtggtgcgtgacgaagggacgcgcgttcgcgccgccgaggatggggtgcaggatgggcgtctccacctcgtagtagccgtgatcctccatgtagcggcggatggcggaaaccaccttgaagcgcttctcgaacgtgtcgcgcacctcgcggttcatgacgaggtcgacatagcgctggcgatagcgcgtctccttgtcggccaagccgtggaacttctccggcagggggcgcagcgacttgctgagcagctcgaacgatgccacggacacggacagctgcccgcgcttcgtgcgcatcatcgtgccctcgacgccgatccagtcgcccacgtccaggtccttgagctcggcgaacgcgtcctcgcccagcgcgttgatgcggcagaacagctgcatgtcgcccgtggagtcgcgcagctcgaggaaagccagcttgccctgatcgcgcttcgccatgacgcggccggcgaccttcacctcgtcctcggtggacgcgccgtcctcgaggtcggcgtactgttcggccaggtcggccaggtggtgcgagtacgcgaacgcatggccgtacgggtccttgcccgctgccatcagcgcctcgcgcttagcgcggcgcacggcgatggggtcgtcttcgatgatctgctcggtggtgtcgatggtatcgctcattgattgtcctcgaaatcacgggttggcgtagtaagtcagcgagaggcgccctggtgcccgagatcgtggggagggcgagggcgaagcgtacttcggtacgcgagtccctcggcctcgccgcgagatcgggtgcaagggcgtctcgcagcgtcggcaagttgcgccgttcgcagaacggcgcaactcactagtgttccagcttgagaatggtcatggtgatcttgcggccggtgggacccgtggtctccaccacgtcgcccttcttgtggcccagcagcaccgaacccaccggggactcgttggagatcttgccggcggcggcatcgctctcggcgccgcccacgatagtgaacacgcgctcgcgcccacccatgtcgaccgtcaccgtcgagccgatgtgcacgctgttcgagcgcttcggggtgttgaccaccgtcgcctcggaaaggatgcggctgatctcggcaatacgcgcctccatcatgccctgctcgttcttggcgtcgtcgtactcggagttctccgagatgtcgccgaactcgcgcgccaccttgatgcgctcgccgatctcggcgcgtttctcggtttccaggaagtggagttcttcctcgagcttgtccttgccttcttgcgtgagaatgaaattgccgtctgccatgaatgctcacctgtccatttacaaaaacatgcacgctcgtccgcaagcgtgctaccggtacctgatatgaaaaaagcggtatgtgcagagcgccgagcgactgcacataccgcgaaccagacgaatgtaaaactactcggctttcttcttagccgcggtggtggtcttcttggccgcggtcgtcttcttgacgggctcctcgacctcttcgatcacttcttcctcgtcatcggcctcgacgatgttcttatcgccgccgcccatgccttcgcgcaggttcttgacggtcttgccgatggcgccgccgagcttcgggaggttcttcggcccgaagatgagcaggattaccgcgagaatgatgagaagctcaggcattcccattcccaggattttcatacgttcctccaaattgctcgtgcgaagcgcttctgcgacctcgctccccctgacgcagccagggtcacatgcctatgcaaaaaagggatgttccccatcccctttagcaaccaaataactgctttcgcagcgacggttatgatagcacaatgttacagaaggtaaaagaaaatgcagcgataatcccctttccacgccttctccactgatatgccccgccccgccttcgccatggcgagaagcctttgccgtagagcacagccaaccggacgagacgcggtcatcaaccaattgaatccattttgaaccccgttttgaaaccgctattcggtcggagaccaccgaccctatgcagaaatcttgagtatcgaggccctacttcgcagagaacagccccgaaagatagctataactaccgggcattttatcaatcggcttgcttccgatgagctctacgctttcggcattgtattggtatatcgcccaatctccgagcacgtatatcgacccttcagtcacaaccatttgcatcgcttcgtgctcgaaagcatgctcttcgatagcccccgtctctagatccacgatgctcagcgcgctatcgtcttgaccttgaacgacattgtagtgggcaatgtaaagcttgccgtccgcgatagccacgcttgaaggaccgcccttgctcaatggaatgaagctcaacgtgttgccttcggtgtcgagtacgccaatctgtctttccacaaggccaacgctgcagaaatagattttgccttcatgcacaaccgcccggtaggcgtccgcaaccctataggcgttcgaatcataggtgctgcaatcgattgattctttgagggccaagtcttcgtcgtagcaataaatcatcgaagagtcgtcatcgagagacaatgcgaaagcatacagactgtcttcgcaccaaacgattttcgatacacaaaccccctcgatagctatcttcgacacgtccccgttgtcgattcggcagcggtttatataagacgaatcgcaggtgaagacgtactcatcgttcacggccacatcattcatgcccgatcgaccgatagcgtgtgttttggatgcaagggaagctacatcgacctgaaggacggcctcgccgtctctaaccttagaccttccttggggaataacaaaaagactgccctggtaaaccaggggattgtgaaaaacgtcacccaagttcgcatagcgcagcggaagctgcgccacctcgttcaactccccatcgtagaagacgatcctgctcgtttcatccgtccctcgcgtttcgatgatgccgatagaggcgtcgacgggcgcaacccgctcgccatccgaagcgcaaccatacaagccgatcaccgtgaagagcatcgcgccgattagaaagggtaccgaaactcgtttcatagtcaatcctttgatcgcaggcatcagggcaacttctggagacccgaaaaacccgatcggatgaatgatcgaccctaagaataacacgagccgagaacaaaacctgtatgtttgggtatcgacgggagccaaagacaacgctggtcagaagagctcaagcgaagcgccgaaggcgtgctgaccgcgcgatgcgaagtgagggttttctgcccggagccgtttatgttccgattgaaccctcacgggagacgatatgagcagaacattgtgagcccctgcttcgtgtcgtctttgttttgcgtgggtcggggccgataatggttcgtatctagcaagccggcaatcgaccaggttgccacagacatgagaggggctcaccatgtcctatgttacctcaatcggcctcgacgtacacgcacgttcgataacagctgtcgcattcgatcctgcaacaggagaagtgcgttcgaagagattcggctatgctccggccgaagtcgctgcatggacgctagccttcgattcccctaaagcggtttacgaatccggcgtgaccggattccaccttgtccgcgccttgcgaggtcttggggtcgactgcatcgtcggcgccgtgtccaagatgcacaagcctgcagccgacaagcgcaagaagaacgatcgcaacgatgccgagttcttggcgcgtcagcttgccgcccgcaacatcaaagaggtctggatacccgatgaggagtgcgaggcggcacgcgacctctcccgcgtcttggaagacgtccgcgaagacctcacgcgcgcgaagcatcgcctaacccacttgctcatacggcatggctacgccttcgacgagatcgggccggacggcaagcgcaagggcaagtggacgagggcgcattgggagtggatacgaagcatcgagctttccgaagcggcggcgcgcgacgcccttgacttctacgtttccgaagtgcgccatatcgaggcccagaagaaggccatcgaaaaagaaatcgccgactacgcccgtgccgatcgttggcgtgggcgggtggaagcccttcgccgtctcaaaggcatagagaccatgacggcgttttcccttgtggcggaagcgggggtgttctctcgcttcgagagcgcccgcgcattctcgtcctggctcgggctcactccttccgagcattccagcggagagagggtgagccgcggcggcattatcaaagccggcaacacccatcttcgaaagcagctcgtagagtcgtcgtggcactacacgagggctacgaccaagcgcaagagggatcagcggggagaagaggtgccccttgcaatcgaaaaccatgccgcccgggggcgtgaagcgccttgcagagaggcgggctcactttgcaaggcgcaatcttcgcccggcggcggccaacgcggccaccgcaagagagctctcctgctgggtatgggttgtgggctgcatgtcggaaggggctctcgtatagaaactcgttaacgttcgatcttttatccagcaagcccttcacgtcgactggtcgttggatgcgatcccagctgctttttttggacgccggtttatccggtacgcccgcacggagactcttctttgaaggtgcgcgcatccagccgtagcaacgaaatgcgaagccagcgcagcgaacataccgggcaatgacgcactgttgccgacctcggcatcctggggttataggcaagaaagtgtgtccgttttaggggtgtaagggcaggtcaaaccctcgataaaccatcgtttaaatttcggaggcaggtttaagtgcctggcaagaatgtgtgtccgctttcgacttgacaccgcaggtcagaggccgtaaaccgccctcttaaattccgtggttcaatcacgggatgaagaagatactgtgccctgcgtgcgggggcgacacgaaacgcaacgggaagacctcgtcgggggcgactcgttggcgctgcaaggcatgcggcgcatccaccacgcaacgttacgacaacgagcctaaactgctagagctgttcctgaggtggctgctctcgaaaaagacccaaggcgagttcggcatgcccggacgcaccttccggcatctcacgaataagttctgggacctgtggcccgtggctcctgtctgtgacgaggtccaccacgtggtggaggtggatggcctttggctggggcgcgacgtcgtgattatgatcgcctgcaccgagaagcacgtgatcggctggcatctagcgagaagcgagaacgcgcaggcgtgggcggcgctcatggcgcgcatagcccctcccgacgtcgtgattaccgatggcggaaaggggttcgagaaggcgagacgcgccgtgtggccgaacacacgcgtgcagcgctgcgtcttccatgcgttctgtcaggtgaagcgccagaccacgaccaggccgcggctccaggcgggcgttgagctctatggcatcgccaagaagctcatgcgcataggtagcctcaacgaagctgcggagtggcttgcgggcttctctaattggtgcacggcatgggaaggattcctaaaggaaaaagaggtggttgacgggcggatccgctacaagcacgagaggctgcgcactgcgcgcggcgggcttctgaagctttgtagggccggtaccctattcacctatctcgacgaaggcctgctcgagggaggacctgttccggcgactacgaacaggatcgaaggcggcgtgaacgcccagatccgccacatgctgcgagagcatcggggattgaggctgacgaggcgcgtcaaggcggcgttctggtggtgctatatggaccttgaagcccgtgcaagcccgaaagagatcctgaaggaaatgccgacggacgtcctgattgctgagttttatcgagcagctgccgaagctagcgaaaaagatgaagcggtggggcgctggggcactgctgtgcaatggaatgacctgcatgcaagcggcccttatcgcatggattacgattaggctctggacacactttcttgcctataacccgcatcctgccagcctgacgctgtgaacccgcgaatattaaactgcgaatacgagcgtcgattaagacacaaccatgagaagagcgagttggatggagatatatgaacagggcaagaccgagagaaatcttggtcttgccctctattgcctcttgacaatgttctgctcatattaaaaaggtcagccgcgaagggctgacctgcaatttctggtcgggttgacaggatttgaacctgcggcctctgcgtcccgaacgcagcgctctaccaagctgagccacaacccgatgtactgcttcaagcagcgacggatatgatagcacaatgtaaccgaaggtaaaagaaattgcgacaatatttctttttccacgccttcttcaccggtgctgtaggttgattttcggatgctttgggaatcgacggatatcccgtagacaagcgagacatgaccatttaacggcatcggggaatcataatgcctgatgatctgactatttcgtagaaacagtcagcaacgataaaccccgcctaaaaaaaactgagccatttcaccgacctgtacactcgccaacaaacgaacatcgatttgacctagacttataaagttttctgtggcacatctgaacccgcggcctttatgtattccccatcttcccaggtaattggacgcgatttcgatgcgttaatacgcttctgacaggattgcccgctgagtggtcctccggaaatgagcttccagcgcgacaacggcggccgcgtcccgaatcgtggtgtatcagggccatcgccggagaatcgccggcacccttgcgaggtgaatcttagccttcgtcctccttcgggtcaatggcgctccctatgatcttgcgcgccgcctcgcgggcggcgagcacctcggcctcgccgggggcctcgcgctcctgggccttccaggcgtgcgcgagcgagggcctggagatgacgcagcgcgccgaccactcctcgtcggcctcgatgagcgccgctcccaccaggcggatgagcgactcgcgcgaggggaacccctgcacgacgcgcgtcctgcgcttgatctcgcggttggccctctcctggacgttgttggtgcggatcttggtgcggtgcgtggccgggaacgccaggtaggcgagcgccgcctcctcggcctccaagagcacgtttccggccgccctcgagatcttcagcacctcctcggtcgcctcttggtagcacgcccgcacgaggacggggctcttctgcgcgaagacggccttcatggcctcgcgcgcctttctctggtcgtccttcctgtggatgcggcccgccacgttgcgcatgaggtgcgtgacgcagcgctgccaggccgctccttggaacgtctcggctatcgccttcgcgagcccttcgtgggcgtccgagacgacgaggcgcacgccgtcgacgccgcgcgccctcaggccggagaggaacgccttccacccggcgtggctctccgtgtccacgcagtccacgccgacgaagcgcttgtggcccgtgtcgtcgagcccgatcgcggtcacgacggcctgggacgccgagcgcccctccacgcggcacttcacgtaggtggcgtcgagccacaggtaggcgaagcgcaccccgtcgaagcgctgcctcctgaacgcgtccacctcggcgtccaggcactcgcacaggcgcgacacctgcgacttcgacatcgacctcacgccgagctcgcccgcgacggcctccaccttgcgcgtcgatatccccatgacgtacatctcggccaccgccgcgacgagcgcccggtccaccctgcagtagcgctcgatcaggtcctcggggaagaacgagcctcggcgcagcttcggaatcttgagggtgacgtcgcccgcggcggtcgagagcccccgctcccggtagccgttgcgcgagttgacgcgcccctcgtcgcgctccccgtagggggcgttgcacgcctcgtcggccttcgccgacatcgcggcgttcgccaggagctcgagcatcctgcgcccgaaggcctgcaggtcggtgcattcctcgaggatcgcgaacgcgagccccttcacttcggggtcgttgaatagtagagtgtccatagcgggcatcgccttccttcgaatctgtcttttgtggtgattgacgattctagacgatgtccgtttttctcgggcaggcttcgcccgccctccagaaacggattgatacaccaactttcgggacgctaccacaacggcgccaccaacctcttgcggaggtgctgtttcggcatacttcacttacaactgtcgttcaaccctaattcagccaaaagtcaagcattatccaaccgcgatgcaaatcagtcttcagcgaatatcgtgtagtcgaacacaacttgcgatggaacgaattcgtcatcatgggattcgtttgtgaccccggtcactttcagtacgcatgcacaaccatggttgttaagaagggcaactcgctggcccacgcttggcgtggcgcacctacacgagcgggtataggatgcaacaacattggcatcgaggtcttcatttggcgcagcgtccggtatcatcccgacggccttgatgtagtcgttcaggatatacaccgaatcgccgccgcgctttccaaaacgaaccttgaattcatagtcgccataccccaatgttatcgtctccgaaggcgcgtcgccgtaggccatcgccacccccttggactcgagttcgggacatgaccagtttcccggttccatgagattatcgattcgttccacgcggtacattctctcccgtatcgtcgccgggctgataccccttcccttgtccgcaggaagtcccgctagccatcgccatagatcatcaatctgctcggaaccgggaaaagagccgtctcgatcgcgatacgagaaatcgaagtatttcggatcacgcccttccatccatttcggaagaagccttttctcgttgcgcacgaacaagacggatagccagttgttcggccgatcgtcaacaacatcctggatcgtcttcgtctcgcgcccaacacccgagtcgggataattgtccgccctctcgacatagccttcatcgacgatcatcaacacgcgtttcgcgtcctcgatctctcgcatgaaacccgtgaggtcttccccgtagtcaacctcggagtcaatgccgacatggaagccaatttgcttcagatgcgccgcgagcagtctcacccactcgcggtgcgcggtgttctccggacctccccatgcgtaggagataaaaacatcgaactgcattcctgcccctcccgtcgctccagaaaagtagctaagcatgcgcgagccaattcttagagtgaaagggaattacccgtcaccatgctctccctacattcgcaaaagctcatccatctttgcatcgtcatgacttcgaacccaatcggtctcggatagaacccagctgagattgctgtgaaacagctcattgaatactgagttgtttcgatattcaatgggaaaatcggcacagaacatccgtccaaccgagagaagcatggcctgatcctgcaatgatacgacgagcttgaaattatctaggccgatgacatctagcaacttcgaccacaaagacatgatccattcgctttcaggatcccactgagtgttagccttgcaagcagcggttaccttcttcgcggtactaccaactacactcgcaacattgtccgcaagctgaacgcctaaacagtcgacgctctcctcaaacctcaagatatcaccaacccccaacgcttccaaagcactgcagtattccccttcgaactcagggatccggtcatgcactaattccaaccctgcgttcgtaattctctcatcttccttgatcatggcgagaagttctccaaaagccgttaagttgacaaggttttgataagaagacttttcatagtcacctgacgcgatgccggttccgagaagcatatcgtaccgccctgtctccacgatgcggcgaagccctgcatgcaggaagctcccctctgtaataactccatcggagttgacaagcagtctctcagttagaagcctagcaccagatgcatctggcatcgcggaaaactccgcatacgctttaagggactcggatccgaacaaagccaggttcgacgcctctgaataatatgcctgagggaacgtaacctttgcatccgggccaaggatcgtctgcatgagagccgtagcaagatagaagtctttcgaatacaggcataacttgaatcgtccacatacaagaaaggtttcaaagaagtcggaaagctgatcgttgcacttgcgagtcagaaggtcacttcccttaacttctcgtccagcagctccgcagcgctccttgaacgcctcatacgatgcagccaaggctccatcctcgctctcgggagacaatacggcccctaaggcatagagagactggccatccttgccgcagtacgtttcatgtccctcgcgggtcaggcagccggtattgcccgattcgtcaaaatatatcttcatcgcgctccatccggtttgctttccctaccaaccgaaccaatcacgtttttatcgccgtaaagtctctctacagcatcgagcacgatcagccaagcaagacccgacgccttttagaaccttaccgcatggctgctccaacgtttttccatcgttgcgattcgaccgatttcctcaaaacgagatcgatcgaatcggaagacgtatgcctctcgcacgggtataggagaacgcacggcacaagaccacttcgtcaatggtatctgttttcgacttcttcagcttatgcgaatcgcagaaatcacgcatgcgggtgttgaccacatccccgggcgacggacaccggcttacatgttatcaaacgtcttagtattacgtcggcaccggtgcataacgctcctcaaacatgagagcgtactcgaactcagttctttcggagttatgacgtcatcggtggagcgtttcaagtggaatcgcctcgccgcctgggagcgtctagtggccgagggtttctcaccggagcagatcgtcaacgcctacgccgcccccgccgagagctactggctgcgcaacagagacgatccggcgcttgcgtagaacctcgcccgccggatcgagaacgagggagggctttgcgcctagagcccatacgcccgacccgctcgacgccgacggagagcaacccgaaatttgcttacccgtagaggggatacagttttccaaatcaacaggtaggatcaatttagcacggtatcgttcgcgcaaaacctgaagacttatgctttgaccagacgtgccaaccgggttcgctcctctgctttttctgctatacctcaaagatgtaggcaagcagctcattaaactgcattcgccctgacgcctaccggggcgcgaagcctatcagcaacgggatgataaacgtttattggctgctttgtttcgaaagtgacgacaagggaatacgggatcttctctttcccaagtgacttaagcccgtttgcacctgcgcagctaacaagaatgtcaataccatcagattcttcagcccacggaagaccgccctctcctatgaaagactggtgctgaagagttccccttcggattgcattccaatcagtatattcgcgggtaggcaccaaacgctcttttgtcaggcccacacggtcgaaccacagttgcgcatgtcgatattcttggcgtccgaaagcaattggcgtaaaatacgccagcgtcaccgtcaagcgtcgatcaacaacccttgatgagaaatcgagcggaagcgggacatggaacagttgcccctcgtccttgccaatatctccaaatccgaacgccgttaccctgttgagcgcgcactctcgaacgcggagataatccggccggccgaaaccaacccaccgggtgctctctttgttcttcgcgccaaactgcctgaatgcgatatctcccaaattttcgtaagcgcatccgtgcacagccattgctttgaggagcagcgccccatattcgtccgggacgccggcaaagcctgagtctagaaagatctcctctaggacatcgaagttggccgcgcattcatgagagaccgctgccgctgagtagctcgttcccgcctgcgcgacataactttttgcgattgcccctgcggttggagcggctgcaatgattccaggctcgcgagtctgcgatagagcgtattcgacgcagttatcgtctttcgctgagacaaggaacttaccaccaggatagagaatttcgggcttgatagaacgtccaattcctccgccaaaagacgtgagcgggcttacgcaaccttcctcaacaggctgaacggcaagagcgttttcttcgatagcagtattatcttcaaatgtcgcacccacagtgatagaatttatgctttcggcaggagaaaggagcttgagattcctcctgttttccataagtgcctcgctaatatgcttgcttcgcctctcgaggtcttcgtccttcagcttctcgaaacccccttcaactggaattaagtttatgtgctgatttccggcgcttatcacgaagagaacacgatatttgtagctcagccaatcaagcagtttcgcaagggggctgggagcgccaaaaaactgccgaacctcatcgccgatggaaagattgataacatggagagttggagcagccggcgcttcgtcgccgtcgccgtcgaacattctcctgaccgctctgtgaatgagatcgacaatgagaacattctccggatatgtctccttcataccgaataccgcgtctgggcgcatcactggtcgcacataaacgggtcttgaggcggtcgagggttctggtgctgccagatcaccatgcacgagcatagatgccatcgcagttccatgcatacgaaggcttgcagggtaatcgtttccgaactcatccgggtcgtcaacaatgattctattgcgcagtgcagcatgattctcgagaggcaacccgtcaagcatcccaacgatggggacgcccgagggaagctctgcaccgaccttgtcgtcaatgtcctcttcgaatatctcacctaggagaccgaccgccatttgacctgttgggcggaagtacatgatttcattgcacgtcgccaaagaaagattttctctctcggcgccgagaaggttttcgatttgatcaattggaagttcaagcaacattccgtggtatctgatctcctcgattgcgcactcacttgtaaccctgccattcattgcttcaactgctctgcgcacgctcgctgcggcggcacaccgtttagttgggtcgctgcggtaaaaaagttccgcctcaaatgtcgagggggacgagcccttcacctggatggtttcatgccagtcttccaaaatcccagtgtcttcgaaacgatcttccggcccccagacgtgcacttcacgcagcaacccaaacaaatctcgtaacgaagtaaaaccgtgtgggaattggaaggtttcgtccatttgatagtgtttccaggtgcttataagctgatcaagtgccgctctatcgctcatgatgcagtagacgcgacccgagaaggacgcttcggcgttttcctcgtcgtagaagtagttgtctggagccatgtcttcgttttcgaggtcgaatagccattcgagtccttctatccttttgacagccccataaaacgagttaagggaacctgcgacctcgaataccaaggcgagttccggctcaattctatcgggagaacgctgcactttcacgcgttccctatcgaaagcgccacaaaggcgtttgtacatgggctcaagacgtcttccttgggcagcaatgtcgggacgatgcagtctagtaggaccgccattacggtcgcccttgacctgctcacttggctctggaagcatcagcagagggtactcagcggccatcacttatcgcctccatcgtcaggagtgctttgcttgcgctgcttgctccaaagctgcagcacttcgtttgtaatcttttttgtgacgctagaagggagtaacaatacgtatcgtctatatatctctatagcgagctcttccacttctgcgaaactgcatccataaaccttcttcgctatcgtttcgggctcaatgccgaagtcaaagtcgtttctgcgctcgaataaagatagccacgttgatagatttgctcgcgttggtggaggaagctcaacgcgaatttgaaatctgcgccatgcggctttgtcgagcagatcatcgtgattcgtggcggcaatcacaaccacatagctaggaagcgagtctatttgcagcaaaagcgagctaacgacacgcttgatttcccctgtctcatgggtatctccgcgctccttaccgagcgtttcgaactcatcaaagaaaagcacgcaaggacgggttctcgcgtaatcaaagagttgccccagcctgcttgctgtttcgcctaaatacgatccaataagttgctcgtaacgaatagtgagaaaaggaaccatgagagattcagcgactgcctccgcaagagaagtctttccattgcccggggctccaacaagaaggattttgtggcgcggctcaaggccgtaagatcggagcaaatcagcccgaagctgctcctctaccaggtcatcgcaaagcctacggacgaactccggaagaacgagatcgcccatcctacgctcaggagttttttcgatgaaaagggtttgcgccgcgagaccgcttgatttgacaatcgtatggttccgaaccgacttttgcttagtattagcagcggtcagaacgattttctcaatgcgattagcaagcactgtgtgctgcttttcccgctcttcagcacataccgcttcggctgattgtataaatcgtttgtcatcgtgagcaagtccatacttaattagatcacacaataggtctgctcgagccacctgcctcaccccctaaacgtatcattcccgaggaaagctaataaaactgctctcacaaaagtcctcaaaggctttctgggcaagtgaacttggattcacttgcccattctcccatcgattaaccgtcgcaaagctgacgccgagcgcttttgctagttcagtttgagtcatactcagttgtttgcgtgcgtatttgaccatttcgccgaaagtcatgatagctctaacctctgtatcaaatgttatattttgaattgaaaaattgcccaaacaatattttgccacataatggcctgcagataaactttgctagatgcttacagatagggatacaaaaatcagtatcaagaaccagcttcggaggggatcatgaagagcgccgatgtacaacgagaaggcggacagtgcactgccgctctcgatttgattcatccccaacgacaaggcgttgaagcgacttccttcaatttgctgtgtggccccaaaaaacgtgatggtattctcgaatacgctgattcatgagcgacaagtgcgctccgagaagcgccgagcacaagatcgcactgggcattcgctacatgctctttcggcatccggaaacacaagtgcgatcctctacgcttcggccaccgacgccagattttttctcacgacaacccgtttttcggcacagtaagcgagatcggcatccgcgtatcagacagaacctcttcaacgtgataacataacttgctaggttagttatttgatcctgcgctaaaggggtttcgcaatgtttggtgaagcggttaccgtttcttcggttgtttctgcattcatctctgagttcgtcgccaagacaacgcaatgggctgaacaaggacgcaaaaaggccaaaacaaaggaatcgctttcaggtgcgctcgacaacctgacctcagatctgaggtcagcgcttgagcaagcagccgatgtaggcctcgatgaaaacggcttgtcgttttgcgactggctcggcgaagagaccgagtatatctacgactcggcactggagacgaaagaggaaagggattcgcgaatcgaagcgctcctccttgaaggtcaaagaaaattcggtttcaaaggcggcgaggacaaggcggaatccatagccgaagcgataagcatcgcattcgattactgtctcaaactgagatttgggcatctaaacgacgacgacagaaccgtcgtcaacatgacggtaacatacggagaagagacggtcgaccggcaaacgactgagataatctacgccctagatccaacactcgcgaccgatcgtgagtggctgaagtaccaggatttccttgcttcccaatccatgacggcgataggcaccaaattcaccgtcgacgagctctacataccgctcaacgccatcgagactgcggaggccacgttttatcctccacaccaagattcccatggccgcctcttcgatctcatcgagagtaataatcgtttagaaatccagttgtttcccgaaaccgttgcagaggcatccgttgcccattggcctatcgagcatagccatacctcaactttcaccgatacagtaagcttagtcgtttcagtagatgagcgtatcgcgcagtggctggaaacgcccgattttagggacgaccacaaccctgtccttgttctttccggagatcccggaagcggaaaatccaccgttgccaggcgcctttctaaaacactggccaaaaccgaagaggtcaacgttgcttacatcagcctcaaagacgtggcgacggattcgcaaatcgacgatatcgaggccctcgtcgtgaaatacatcctatcgttgcccggtcgcgacttcgttgtttcgaagcttccaacgagcaagcctctggttctcatattcgatggactcgatgaatatgcagcgcgaggacctaagagcaaaaaggcagcatggggtctcctgggatccatacttcgatacggacagcgttgcagcgaagcctccttcccaaccagagtcctcgtcacttcaaggaccacactgcttcgagatatgaaaaaagaagtatctccaaaagagtgcaagccgattcgactcgagctgcttccctacgtttgctccgaaagtgagttaggcgacatttgcgacccagacttcctcctttgtgaagataaaaggattacttggtggacgaactacggagagagacttggtagggatatgagctcgacgatggaaaagattttcaagtgggacgacgaagtgaagttatcggcccagcctatcctcaaccatctgatagccgtgttcgcaaagaatattctcgagacggctgcacccaaccgcgccgaggtgtacggaactttgcttaagggcgtgataaaccggaattacgatcacgcgcaaggaaaggcgaaaatacatagcagaacacgcgcagcggacgtggcggggtatctcgagttcatggaggccgctgctattatggcatggcacaacggcggatctatcacggatttaaagcccttgaaaaacgaatgcgggagcgaacgcgctaaagaagcctttgattgcttcaaaagcgaggcgcgcatcaaggataatataatcgctggttactttcacctaagaaacaaaaacggcgaggagagttacgagttcgttcattacagtttcatggagtacctcgtatcgcgccgcatcgtcggcgagttgaccaaaatgctcgacaggaaagtttgccccatcacatcgatgccaaagctttacgacatgctgggctgttcggaactcacggacaacacgctatcgttcataagggccgaactctctctgttcaccaaaaagaaagccgcctcgcttcaaaaatacatgatgtcgttattcatggaatccctattggaatacagcttcgatgagacgttttttgataaggaaagaaacggaacactgttttcgacaaagttatcatccattcgcaacgtccaggggaacattctggcgctacacagctgcgctgccaaagtgactggcgagaggatgggcgtatctttcaacctattgttacaatggttgggagggatcggtgtgtttgcatgggaaagcaacgtttcttctttcttcaatggtcttgagccgatcatagagagcggggaagatgaatacattctgacgctgcctttcgcgcaactcagttcgtcggatatgtccaattcgttcatggaacacgcaatattcaccggagcaatgcttgataacaccatcgtagtcaacgcggatatgaagcatgcgaatttcaatgacgcccgactcgttgacgcgaaatgctcatatgcccatttcgaacacgcgtccctggaaaaagccactcttcatggagcgcacttcgatcacgcccacctcgagaacgcccacttgctaggagcagagttggagggggcgaaattccagcacgcccacctcgaagatgcggatttgcggttcgcaaagctcatagaggcagaatttggatgggcgaaaatgaggggctcaaatatgggaggggccatcctccgcgaggctgatcttcggtatgccgaactcaagggatgcaatctcgaaaacgcgatcctcgacaaggcgaaggtgctgaagaaggacatcaaaacactccacgaatgcggtgcggacgtttcaaaagttatagcgtacgacgaatgagaaaacagcgtcaaatcacttgaacttcggtctatcactctaattttcaataataatgtataattgcactttattcaaaactattcaattttggtgaaactatatggatgagctaagaaaatacctgaacgaaacgcttggcttgaagatcgaatacggtgagtggcttcccgatgccaacttgccgctctttctttcgcgctcggcatcgtacgctcgatgcgtgttcgaaggcatcgcgttcgtagctgcgaagatggagaacgaggacggcctcccggacatcaagagggtgcacaatcagctgggcagatacaccgacctgcccgttgtcattgtcagcgaaaccctagacgcgaggcagagaaaagcgctcgtcgtgcaaggcgtgcctttcgtcgttcctggcgtgcaggccttcctccccttcttggcctttgcagcgacatcgagagagccccggaggtaccgccgggggggccgcctatcctccagggcgcaagcggccttcgtcaccctcgtcgcgcatcccgaggtcgaaagcgctgcggagctgagggaggtcgccggtctcacgccgagcgacgcttcgagagctctggccgagctcgacgagcaggggctcgtcgtccgctcgaaaagtggaaggtcgatgctgctcgaacgcgaacgcgactcgggcaaactgctgagggcggcgaagccgttgctgtcctcccctgtgagcggcatccttcatgtcgagcgcaacgcggcgctaaacgcgctgcccgatgccggcgagaccgccctggcggtgcggtcaatgctcgccgtgccgccgatcagacgcaaggcggtatctagaaagagactcaaagacctgtccttctcggaggtgctcataggcgagatcgacgataatgacacgatcgagctccaagtatggacgtacgagccgctcgtcaccggcggaaaggacatcgacgacgtgtcgctggccctctcgcttgccgacagcggagacgagcgggtcgagaaggagctgaacagcctgttcgacgaggaggatttatggtagcacgcggagtcagaggactggatcggttcaaagagcacatggtggggctcgaggacagctacgcggtcatcggcggcactgcatgcgaggtcttgctggaggatgccgatctcgagttccgcgccaccaaggacatcgacatggtcctcctggtcgaaggacgccttccggaggctgccgcagcggtatggaggctcgtgagggcgggaggctacagctgtggatggaaagggtcggcgcgtgcccacttctaccgcttcaccgagccgaccgatcctggattccccgtcatgatagagctcttcagcgccgcgcccgacttcatcgacgaggacgctggaatcgtcgtggccccgatgcccctcgatgacgaggtatcgagcctttcggccatcctcctcgacgaagactattacaggttcatgaagggaagatgcgagatcgtggacggcatcgccgtgctcggcgaaaccggcctcataccgttcaaggcgaaagcgttcctcgacctctcccaaagaaaggcgatcggagagcatgtggactctcgagatcttagaaaacataagaacgacgtgctcaggttggctcagatcctgaagcccggccagcacgtagaactagctccgacgatcagggcagacatgtcggagttctgcgacaagatctccgacgacgatgcgaacatgaggcagttggggatctccgcatcctacgaggacatcatcgagctgataagggatacgtaccggctcgattaaccgctgcaaaattttcgcatgttcgaattcctaaacgcgaacggtcctgcagcatgctgcggcaggaccgttcttgcgaggcgcggcgacttgtaagcgatcgggcggcgcagcttattcggtgcgcaaagcctcgatggggttcttgcgggacgcccggtaggcggggaagatgccgaacaccaggccgatggccgtggctgctgcaacggcaaccgccaccacgccccacgacaccacgaacgccagccccacggtgcccatgagcagtcccagcgcgatgcccgccgcgatgcccagaacgcctccgatgatgctgagcacgagggcttcgagcagaaactgcacgaggatgtcgaagcggcgcgcgcccagagctttcttgatgccgatttcgcgggtgcgctcggtcaccgacaccagcatcacgttcatcacgccgatgcccgcaaccacaagcgatatgcccgcgatgcccgccaacagcaaagtcatggtgccgtcgatctcgttgccggcccgcagcatctcgtcctgggagatgatgtcgaaacgtccggggggaatatgcgccgtgcccgtgaggtacgagcctatctcccctttcgccgcctcgatggcgtcctcgccgcgcgctttcgcgtagaaagaagtgatcgtgccgctctcccccatgctcacggcagtagagaagggaacgagagcaacgttgcccgtattgagccccatcgactggccctggttctgcagcacgccgaccacggtgaactcatcgccgtcgagcttgacggtacggccgaccgcgccgtcggccgagccaagcagcgtcctcgccacatcggagcccagcacgatgaccttgctacgattctcccggtcgacagcgctcaagttgcggccttcctgcaatttgaggttgcgcacgtgcaggtagtgctcgtcggtggcctccacgaacgccttgttagcaaccgtcgtgcccaccgaaagcttcttcatcagggacttcgagggcgccacgccatccacggcaccgaggtcgttcatgcccgaaaggtcgttgtagcccatgtcgccgtcgaacaggtaagccgacagcgcgtctccgccgagagctttcatcttttcgctcacctgccggttcgtcccgtcgccgatgcccacgaggatgatgaccgacgaaatgccgatgacgagacccagcatggtcagagccgagcgcaacccgttgccgaacacagcctgaacggcagttcgcgccaattgactataccgcatgcgaacccctttccatttcctgtatcaagccgtcagcaatgcgcacaacacgctgcgcctcgtcggcgagctcctggttgtgcgtgatgaggataaccgtctggccctcggcgtgcaggctcttgaacagctccatgatctccacgccggtgcgcgaatcgagcgcgccggtgggctcgtcggccaggatgatctccggctcgcacaccaacgcacgggcgatggccacgcgctgctgctggcctccggacagctggttcggcaggtggtgctcgcgcccttcgagacccacgagcgcgagctgcttgcgggcacgggcgtcggcctctttcaggcgtaccccggcatagctcagcggcagcttcacgttctcgagcgccgtgagcttgcccagcagattaaagcttaggaacacgaaccctatcttttcgttgcggatggaggctagccgattgtcggacaaagccccgacatccatgccgtcgagcaggtagcgaccctcgtcgggcacgtcgagcagcccgaggatgttcatcagcgtcgacttgccagatccggacggccccacgatagcgaggaaatcgccttggtcgacttgaagatccacatgatcgagggcgcgaacgaccccttcgcccatctcgtaggttttggaaacgctctccaagaggatcatcgccgaccgcctactctaacaccggagtcacggttataggcccctcttcggcatcgccttccgagaagccgccgcccgcaggctctgcctcgttgagaaccacgagatcgccttccttcagaccctcgcccgacacctcgaccatggtgccgttggatatgcccgtggtcaccggctccgcacgctgctcgccggatgcgagatcgtacacctggacgaacttgtcgtcgcccgcgccgatcacggcgctcaccggcaccgtgagcacgtcggaggcttccgcaacggtgatggacaggttggccgacatccccagcttgatgctgccgtcgttgggcactttgaccgtgaccgtgaacttggagcccgtcgcgccgtacgtacccacctcgttgatgttggagatggttccgtcgtactcgcggccgttatcggatcccagcttcaccttcacgctttgcccttcggacaaaagccccagatccttctcggaaacctccatggtgaccgacaccgtgtcgatgcgctgcacctcgatatagtggtcgtccttcgtcacggcgcctttgtttttctccggaagctcgcgcgaggtgaccacgaggtcgtacggagccgcccacttctcgccgttggcgtaggtcaccagcgtctcgcctgcagcaacgcgcttgttaagcggcgcgtcgaacgattgcagccaatgccagctgtccgcaggcctgagcttcacggtttccagcggcttcacctcgccaacgccggtgacggtctgctgcacggatcctcgctccacgggagcggtcagcggcgaaacggtctgaggctcaccggaaagcgccgccgatatcttgtcgccgaacacgagccaagcggccagcccgctcgcaacggccagcagaagcacgacggtcacggacttgcctactatgcttttcacaattgcgttcctttctatagttcgcgatgccaggattgccgatgtcgatcagggaacgtacgtctcgccctcgaccgagggcgtcggctccgctatgacgtcctgagccgtggcttcgtttcgggttttcacagtctccggcgcatcggttcctcccgcttcgggaagcaggttcttggcaaccagcaaacctcccagcacgacgataaccgcaaccagcactccgacgagcaccttgaaccctttcgaccccatcgtcgactcctcactgcgcacttctgcgcgtcgtctcgatatcttccggcggccagtctaacgaaagccgccttaaaacttcctgaaccgcggcgatgtttttcgcgtctccccgccgaagcttgccgagggggtcggtttcaggatcgtttcaggttgcgcgtgctagaatgaccgcatgaaactgctgatcgtggaggacgaccgactcctctcaaacgccctagcccgcagcctgcgggacgcttacgccgtcgaccaggcgttcgacggcgaagaaggcctgttctacgccgctcaggacgtgtacgacctcgtcgtgctcgacgtgatgctgcccgaacgcgacggcttctcggtgctggaagccttgcgcgcacaaggcgtggacacgcccgtgctcatgctgacggctcggagcgcgaccgccgacaagcttcgcggactgcgctcgggagccgacgactatctcgcaaagcccttcgaccgggacgagctgctcgcccgcatcgaggccatcctgcgccgcacgacgggccggcgcgacgtgggcatcgttgcgttcaaggagcttgcgctgcacacgcgaacccggcaggccttcatcgcagacgagcccctcgctctgaaaggcaagcagtacgacattctcgaatacctggtcagccaccagggcagtctcatctcgaaagagcggttgttcgacaagatatggggattcatgtcggacacgtcctcgaacgtcgtggaggtgtacgtgagcgcgctgcgcaaagcgctggctccgaccggctacgatcgctacatcaagaccatccgcggagcaggctacctgttcacggaggacgatcatgactgagcgcgcgctgatccaccgagagctggttcggcagacggcgctgctgttcttcgtgttcgctttgctgttcgcgctactgggcgcaggcgtctactccatggtgagctcgaatatctaccgaaacgccgacgaaaacctgcaggccattggcatggaatcggattacataaccctcgatgccgccggcagcggatccgcgatcgtcgacgacgtcgtggtagaagagcccgacggcgccgccccctccgacgccacggcgatcgacgacctctccctcacgcttcagcagagcatcgtggacgccgatccgcagttcatcacgctcatacgaaacgagcagggcgaccttctcgagaccgtggggctgtacgcctcctatccttccttcctgcgccatatccccttcgacaagaacgacctcgaacgcgtctaccagattgccgcggggggtcacgagtaccgcggcatcacgtatgcggcaagcgacgaaggcgagaccacgtatcttcagacgctggtgaacgtcgactcggagatcgccattctagacggcttcacgcgcacgttgatcgtctacttggcggcagccgtcgtcgtggcagcgggcgcaagctacttgctttcgcggcgcacgctcaagcccatcgtggcgaacatgcgcgcgcagacggaattcgtgcagaacgcctcgcacgagctgcgcacgccgctcgccgtgatccagaccaccggcgagctgctgctggacagccccaatagccgcatcgtcgaccgcttcgaggacgtgaacgccatcacctcggagacgaagcgtctcgcgcggctggtggacaacctcatggagctgtcgctgggcgatgccgggcgctcgtcgctcgatgcgagcgcggtgaacctcgacgcgctcgtacgcgaagcgtgcgcagcttacgaagacttcgccacgctccaagataagcgcctcgaagtggaaacgggctcgcgcgaaacgatagaggccgatgccgacaagttgcggcagctgctgggcatcgtgctggacaacgcgctcaagtacaccgcgcccggcgacgagataaccgtgcgcacgcgcgcatcgggaccgaaacagtgcgtcgtcgaggtggccgacacgggctgcggcatagaccccgaagaccgcgcgcacgtattcgagcggttctatcgcgccgacaaggcccgctcgcgcgagacgggcggctacgggctggggctctcgctcgcgcaacacatcgtggaagcacacggcggctccatcgccctcgaacccaacgaaccgcgcggcacggtcgtcgtcacgctgcccgcaaacgcgtctaaaagagtcgattcgctctaagacgtccgctcctgctccttctgggcgaggcgggcgagcgatacgatcttcgtcatgatcacgccgtccgacaccacgtcgcccgcatcgtcgtacgccgccacgttccagtactgcttgacggcccccgtgcgctccgacacctcctcgcggtcgaggtcggccacgccgcgcagcgtgccctccttgccgcttttacgatggcgaacctgcacgtcgatgccgaagggacgctccttgtcgaaatccgtgttctgctcggtgccgatgcttgccaccgtttccagcagcgcgatggtggcgccgccgtgcaggtagccgtgcggctggaaaacctcgggcacgatgggcatcgtcgcctcgacgtggcgcttgtcggcggaaacggtctcgatgcgcagcgtatcggtcaacgccatggaagcctccttcgttaacgaggccgcatcgtcgcggcctccgtgcggtttttcgtcaagtatacccgcagcgcgccatcgcggcaccggacagacccgcgctgccgtccctcccctatcgcgcgtcgttcaggctgcggatgaggcgcttgacctcgtcgtcgacatcgcgcggctcaggagcaggccgcccggtgaggtagccctgcacgtaatcggcgcccaattcgcgcaacgctcgcagctcggcctcggtctccactccttccgcgatcacgcggatgccgcgatcatgcgcgtacccgatcaggttgcgggcgatgtcttgatggtctttcgccacgtcgatgtcgcggacgatctccatgtcgatcttcacgaagtccacgtggtagtccaaaagcgacgtctcgccgttgttgccgctgccgaagtcgtcgatggcgagacgcgcgccgaagcgccgcgccagcgcctctttgtacaacgccatctcgcggctgtagtcgctctcggtgatctcgatgacgaggcgcttgagcaggtccggatagcgctcgttcagtacgagctcgtcgtcggacgacaagcgctgcgtagcgatgctgttcacgaacagagtggccccatgcgcctcgggataacgggagaacgcctcgagcgcgccgaaaaacgtgaggtgttccacacggtagagcttcgactgcgagcgcgccagcgccagaacctggtcgggcgtcggaatggtgtccaactgcgagcgcatgagcgcttcgtacgccaccggctcgcccgcacgcaggtcgacgatgggttggaagtgatactcgacgagaccctcctccagcaagcggttcaagtcctccttgttgttgacgatgaacgacttctcttcgtagctttgccgatcgaacgagaacagatcccccttgcggctgctcttcgccaggtacatggcgaagtcggcgtattcgcgcaggtgagcgaagtccgtcgcatcctccggatagaacgctgcgcccatggacgcgcgcaccttgagcgtctttccgtcgggcgccacgatggagctggcatcgagcatggcgcggaacgtggcgaaaaggtcttccaccgatgcgcgatcggggcatacgtcgacgaacacgaggaactcgtcaccggagatgcgcgagtagaatcccttgtccctgaacgcctcgtccaccacgcggcccgccgccttgatgtactgatcgccccaatcgtgcccgtagatatcgttgatgaacttgaggttgtcgaggtcgagcatcagcatcgctcccagcgcaggcgggcgttgcgcgagcaggtcggtaacctcctgctcgaatgcacggcggttgaacagcccggtgaggatgtcatggtcgcgctcatgctcgatgcggcgacgcgtctcgatctcatgcgtcacgtcctccacgaggccgagcacgcggttgtgctcgccgctttccaccaccacgagacgaacccacgaggttcgatgcgggcccgtgaagaggtagcggccctcttcctccacctcgatgtagggaacgtaccatttcataaggctctcgaactcgctcgcgctcaacgaccccgtcgcaatgcgctgcggatcgaagtacgagggatcaggaggttccagcgtcgacaacgtggcgaagaacccgtcggtaaaggtgatggcatctgtttcgtagctgtactcgaaggcgccgatgccgcggtcggacaggcgcaggatgcgcgataggcgcgatgcggtcatggccacttcctcccccatcgactcgatggcctcggacagctcgtcgacctccacgatgcccgtgggagtgaacgcaataggctgctcgggctgcgccgcgcgcacctcggacatgagatgccgcaaacgtgaggacgacagccacgcagcgacgacggcaatcagcaagcccaccacgagcgatgcggcgaacacggcggtgaggttgtcggacagcgtcttcgatgcggagaacatctcgccttcgcgctcaagcccgacgagcgcccaatgctcgtacgcgaacggggacgtgctgtcgtagagctggatctcggctgcactggcgacggctcgcgcgtcggaggaagcgtcgtccgccggatctaccaccatgcgtccggcgccgtcgatcgacgcggagaacgcagactccttcaggtacaggctctgcgatgcgccggtggtggtaagcgcctcgtacacccgctccttgtccggcagcggcgccacgccgccgtctcggacgaagccgccgtcctcgttcgtgatggccagcacgtacgaaccgttgccgctgctggcgagatcgcgatacgggaagaaggatgcaacgcggtcgaggcgcacttccacgcctatgacgcccacgatgccccctgcgcatccctgataggcttgctgtacgtaatggaaggggttcccgcccatccgaagtcgaccggacggccccagtaacccagatcgttcgtgctggcctcagggtagcgctcggcagcgcgcacgggctcgtaatagaatgcgctccggctttcaccctcggctgccaaggggaacgtggcggaccacatgctgtcgagggtgacgcccagctgtcgcccgatgctgatggggcaggcggccaacatgagatcggaaccgttggcaacctccaccttggggttcgagtcgcggatgtacagcgccgtccgattgtccgattgtccttctgcgccgtcagccagcacaaggaacacgccgtcgacttcggcgcgatgagaataggccagaaggtcttgggaagtcgcctcgattatggagatggccagatcggacccggtttcgatatccgccgacgttgcctgagccgcggccagcgccttgtcaatgctggcggtcgcgctttccaccacgggatcgaagtccgaccagcggaatatcatatcgttttccagataacccgcacggctcgccacgcgctccgagaacagatcgtacgcgtcgatctccatctgtttgagtatctcgctgcgcgcgagcacggtagcgcagacgacgccctggattcccaacgcgacgcagaacggcaaaacgacgagagctcgaaacgtcactcctcgccgtctagccgtgcgcttctgtccggaacgcatcctcaatattaagcgatcgcttccctgagctgggtctccaggtcggcgagccaagcgtcgaaccctgcgtcgtcgagatacgaagccacagcctcttcggacgatgctcccgccgccattgcttcgaccaccgccgcacgatcggccaccgccctgtccgacagcgcgcggtcaaggacggcgcgcgcctcaacgccgcctttgaacggcgggttcgcgtacacaccggcctcgatggtatccagcgtggcaggcaggttcaccagatagttgcccgaagcgccgtcgatcgactcggccgccgcctggaggttctcaagcgtcagcgcatccttggtgaccggcacgtagccggcgctcaccgagaagtcggtgttctgctctttagcggtgaaccacttgaggaactcgacgcacgcagtttcctttttctcgtcggacttcgtcaccacgaacccggcgccctgctgcggcgagcacggcttgccgtgctcgaaagacgggttgggcaacgcgtccaactggataggatagctcgtggcatcgtccaccgtcactgtttgcgggaagtacaccaccgaggacgatgagcccacatagcagatgagatcgcccgtcttcaccgcatccgaacggaacttgccctccgccgagaaccagccctgcaccatgggcacgtagtagttgtcccagagcgtcttcatcgtagcgcggtcgaagttcagcgcgcacacgccgttctcaatttcaaaaatctcgtgacccagctgttttgaacctgtgatcaggtagttcgccatagcatcgcgtccgaagaacggacggccgtcacccatgacgcccggcgtctgcgcgtcggtccactcgtagtagcgctccgcgactctcacgatgccctcaatggtgctcatctcgtcgagcgaagtgccggtggcatcggcgaacgtctggaaatcggtcatgttgatctgcagcgtctcggtggacttgcccaccgggaacactttgaggctgccgttgccgttcagatcgccctcttccagaaagccctccacgaatccggccttctcctcttcagtaaggtagcccgacagatcggccaccatgccgaacccgtctatgaccgacgccgtatcggaatacgacaggaacgcgtcgggcatcgcctccgaacccacaagctcctgcgcggaatcggtgacggcggaggccaggtcgttgacgccgccttggctggagctggtcaccacgatgccgagatccttgcctttcgtcgcattgaagtccttgacgaggtcttcgaaagcctgctgctgcgtgccgttgtaataggtccacagctccacctgcaccggatcggacgggtcgagcacggacgaaaccgcatcctccgagggcgccgaagaacccgagcaacccgcaagcgccaaagcgccgacaagcgcgaaagccgtgcccgcgcgccctatgacattctttttcatagtcccctcgttccgtacggcagccggagccgcgctgcatgcatcctgccattctagaacatggagcacaccgaaacgtcgtcaatttaccattgaggccgcggaggaaggctgaatgcgccgaacggatgacgggcttcgggcttaacggcgcaagcccttgcctttctggtcgcgcacggcccgcttcgcatcgtgcttgaacgtcttggtggtttgaatgaggatggcgccgatgaggaacggcatccagaacacgatgccgcggtacacgagcgcgatagacaggcccgccgcgcccgacacgccgaacgacgtgaacgccaccaccacggcagcctccaccacgcctacgccctgcggcgtgatagagatcatggcgaacaacgtggcgactacgtagccgcagatgagaggttcgggctgatgcacgccgaacgccacgcccaccaagctgaaacaggccagctcgcaagcgctggccgcaatggagcagccgaacgccttcgccgttgtcttggggttatgcgcgataaggccggcagcgtcggaaaacgagcccacgatgcgctcgacccaggggtcgaggggctttttcttgaagcgcacgaggacgcggtcgacaagccgttcgatgggacgcagggcgcgcaggacgagagccggacgcttgcgtcccagcacgaggataagcaccatcgcgctgaccagcgctataaccagcagccccaacagaaaccacaagggcgacaaacccaccgtggccgccaagatgccgaacgcgatgagcatgatggtggcgaagcccgagtccacggtgatctgcatgagcaacgcagcgctcgtagccttgccgggcgcgatgccgcgacggcgcgcatcgtccaccacgagcgtggtgcctgccaggttgagagagggcgcgatagtgttcacgaagaacgtaccgaacacgagcggcagcgtctcgcgcggattcatgtgctcgtcgacggcctcgaaggcgtacgagtacgagaagctttgcgcgaagtacttgcccaactgggtgcacaccgccgcgataagcggaatgacggcaccttttttgatggtctcgacgagctcgaccagctggtcgccgcgcagcagcaccacggccagcacgatgacgatgaccagtccgatgagcaggtttcgaatgttgagtttcttcaccgatcagcccgtgcgccgtgcgctcctccgccttagcggaggaactccttaagatcggagcgcatgaggaaatccagctcgtcggacgtggacggatccgtctccaagaacaggaagccgtagttgcccacgcgcttcacgtcgaaggggcgcatctccaacacgtgggagaatcgaccgaggaacgcgtcgtagtcgaagtcttcgtcgcccgaggcatcggccggcgcgttcagcagcgacatggagtacaccttgtcggtcttgccgtcgaacgccgcatcgaagtcgggctcgtcgtcttcgaggaacgcctggtaggtgcggtagccgtagccgtaccagctgacgtcggtgccgccaaggcccgcaaaccgcagcggattgaactcgatggggctcacatgcccgtccgacacgcgcacctccacgtgcacggggaagttccgcgcgccgatgagcgcgttcacgcggtcgagccaagaggcgaacatcgtggaggtgtcgcgcacgatggaggcgctggtcacgtacatgcgatcggaggtatcttcaggcgaggtgaagtcgtggcgcagcacattgaggatgtgcgcgcgacccgtctcgtcgaagtacgcgtccagcgcgtactcggtgccctcaagatagccttcgagaatgaacgacccggcgccgatgacgctttcggggtacatgtcgtgccacgacgaggcgttctgctggatgtcggccagagcgcgctcccagtcctcgcggttctggatggcgtagacgcccatgctgcagaaacccaccgacggcttcagcacgaaaggtgccggaagctgggagaaatcgagcttgaacaactcgtccaccgaacaggatttgaagaacaggtcggggtcgaggccggccagcgcagctcgcatggcggccttgtccttgaacaggccgatggcgcgcgataggctttcgttgtgggcgctctcgacgatccaggccagggcgttctcggagttcgtgtacacgcgctcccctgcgtcgatacggcgaaccgcctcgtcggacgatacgaggttcagagcgcgtccgtcggcgatcgaacgcgcgaaagcgttgtccagcacgggatgctgggactcctcgagccaggcgatcagaggttcggacacgtagggctcatcgagcacgatcatggtttgactcctccttcattgctgcagaatcggcgacgcctgccgttgccgcccccgcgggcgctggctcggcatcatcgccaaagggcagtataccctcatgtccagcctcgcggatgatctccgcgcctttttcggcacgttgttcccaacccgttttccttttcgcaggtgagcgcgcgccgccctcttctcggcgcgaggctatggcgctgccgatgccggcgagcggctgctcacccgctgccttcgccgcagcccgcctggcgcgccaagcgcggaaccgctcgacgttctcgcggaactcgcgcacgaggcgcggcgcgtcgtcttgcggagcgataggacggtcgaacgcgtcgcgcttccagaacagccacatcaccagcagcagagccgccacggcaacctgcacggtgttcacgtagaggaactccgcgccagccaccagcacgagcacgcccaacgtgagcgcccacgccgtacggaagcgcaggatgagtcccacggccagcaccacgagcacgatgctccccacgataaggaacggaccgatgagcaggccgcccatgttgatccaatccgtgagcgcggtgaacggcctgaacgtctgcggaatcaacgccatgccgatgttcacgagtcccacgatgagcacgatggtgcccgaaacccaagccgtgtccttcgcgcgcttctcctcggtagggctcttcttgtcggcgaagaaccccgactgcgacagcagcagcgcgccgatgcagaaagggatccagaacatgataccgcggtacaccagcgcgatggccgtggctgtggccagcgagcatccgtgcgccgtgaggatggcggcgatggccgcctccaccacgcccacgccctgaggcgtggggctcaggatgaccgagatggccgccaccgcgaacgccgccacgagcgcggctacgttctcgaagccgaacgcgtagccgatggccacgaggcacgccatgttgaggatggccgagaacgacgcgtaggacacggtgaccatggtgccctgcgggttcttcgcgaggatgcccgccgacgagatgaaggagctggccatcttgcgcccccaggccggcttgagatgcttcttcagcagccccagcgccttgttgatgagcgactcgatgccgatgaacaggcggaacagcacgcgcggtttgcggtagcccaccacgaacatgctggacagcgccgccagcaccgcagccaacgccagccccccgacgaggaacagcgtgttcatgctgccggacagcagcatggtgagaaagccgatgacggagatcacgaggatggcggcgaagtagccgatctgcgagaggatagcgccgctggtggacgtgcccgcgtccgcgcccgtgcggtgcgcgtcgtcgatgatgaacgccacgcccgtcgcccccgagaacaggcagaacgtgttgatgaacaccagcgagaagatgagcacgacgttgtgccagaagcccgtcttatggccgaccgcctcgaaggccgcgtcgtaggacgccgcctgcacgaggtggcgcgccagcatgagcacgcaagccacgaccagcggcacgagcgcgccggtcttgagcgtcgcgaggaagctcgccaggtaatcggcgttcgcgatgagaaagcacactgcgacgatgccgatgacgagcagcagcgctttcttcaaccagcgtcccctttcgacgaaccatgacggaatgattcagtatagcatgagggtgcgcgctgcaagcgggacgcggcggtcccgccacagaggctccgctaggacgtcgcccggcgcgcgacgcgcagggcgcgcaggaggttgcgcacgttcaccacgtcgaacagcaccgcgaacaagaacgccacggccagccctgcggtgacggccccctgccggggcgcgatgatgaacacaaagggcgcgcccagcagcatgagcggcacgatgagaccgatgaggcacgagccgaagcgcttccacaggccgtatacgatggagatcatcacgtacaggaacagcccggtggccgcggtgcccgcgagcgccgccaccgccaacagcgccaccttgcccgcaatgacgagcccttcgcgcccgaggtcgcgcttgacttcgtcgagagcttcctgcggggtcttgcgcggctcggccgttgcgcggaagggcgcgaacgggtcgaaagggtcgaacggctggctgcccacgccggagccgccggagcgcggcgcgtcccacgacgtccatacgtaggtggtctgcccctggccttggccaggggcctggccgaacggccagcccgcgaaaggatcgccaccctgacccgcgccgccgtaagggttctgcgtggggtgggcgtacggattgttcgcgtaggggcgaggatcgcggcgcggatcgaactcgggcgtccatgaacggttgagcagcacgtcacgcgcttcgttgatgcgcttcgtgaactcttccgcctcctcgcgctccttcgatcctagcgcgaacttgtcaggatggtgctcgatcaccagcttgcggtgggcctgtttgaccgcatcgtcggtcgcgccgtctgagagccccaggatgttgagcgcttcggatttcttcatgttcccactatacgcgccgcccctcccccgccatcatcccgtcagagaacatccacaagccccgacaagccgcggaaacatcgtcgtccggcgtggaagttgggcgcaaaacggtagccagggggcacggacgtttttctggactcctacgcggctgcggcgagtccatctggcggagcggtagttgccgccgccgtcggtgtggacggcgcagccctcctccaggcgcccgagcgcgtcctccagcgagcccgccgtcagctcgtcgtccgggcgcgtcgacgtccgccacgccaccgggcagccgtcgaagcagtctatgatcggggagaggtagaccttgaggccgccgaggtcgaactcggtcacgtcggtcacgacgagcctgcccggcgcgtcggcgcggaagccgtgcgtcccgtcctctcgaagcggcaggttcgcggggcgctcgtcggtctcgcccgcgtaggagctgtggcgccggcgctccttgacctggaccgggacgagcccctcctcgcgcatgatccggcgcacgaccttctcggagacgacgacgggggcctccatgtccccgggcgcgaggtcgcgggcgcgcacgggcgcgccctcgccccgccgcagggccgcccacacgctcagcgacccgtagcggcccttcgagccctcgaaggccgcgcgcacgcgcgcccgcagggccgcgtgcctgtcgggcctggccgccatcgccgcctgcgagaagtacgtgctcctggcgatgcggaaatccctcaggacgtcatcgaccctcgccctcgccgccatcgccctcgccctctcgcccgcccggcgcttctccgaattgctcaaagagcccgggcctggtgcttttaggacgtccaacaccgccagcgcctccgcgagcctgacctcggccagccgcgcccgctcgacggggtcgccttcggggaggtcgccccatgcgcggtgccattcgccccgctcgccgccttcttccttcgccacgccctcgccgcccttccccttcgtcgcgcgcttccgctcgacgccggccttgtccagccagcggcgcacggtcctcctgtccgcgccgatccgtccggctatctcggagacggacgaccctcgcgcgaacatcgtaacagcttccccgcgctcgcgctcgccgtcgggacgggaccggccgtcgagcccgtcgaggcgccccagcctggaggcccacaggcggacgggggcggcgctcgcgatcccgaggcgcccggcgacgaagcgcggctccatgccgcccgcgaggagccgcatcgcctcccgcttcgtcccgagggggtagggctcccatgcccggcggccctcgcacctgcccggcaccgcgagcgcgggcgggcgcaggaggccggccccctcctcgcgcgcgaaggccgagagcgtcgccgcgcacgggaacccctcgaggctcgagcacgccgcgcgcatcgacatgccgctcgcgtggaacctgctcaggacctcctccttgtattctttgccgtaagccattcacggacctctttcctcatcgaaattcagtccagaaaaacgtccggggtcccccatggcaatcatcgggtcgcgacgaacgttataagcgtcgtgagcatccacgaaaccccagatcgcgtgaaatccaaagtgcgaaatccacttgaaaccaaggctaactttgccacagctgccgttttgcgtccacgtcggacgagaaggctacaacttgacgcgccgagcgaaccgaggaagtcggatcccgctacggggcgcccgcaaaaaaacggcagcttcgtttccgaagctgccgcttgcaacatggtatgccgccggatctagtgcctgaagtggcggtggccggtgaagacgagcgcgatgccgtgctcgtcggcggcggcgatcacctcttcgtcacggatggagccgcccggctcgatgatggccgtcacgccggcctcggccagcgcgtcgaggccgtcgcggaacgggaagaacgcgtcggaggcggccacggcgcccttggcctcctcgcccgcctgctccacggcaatgcgcgcggagttcacgcggttcggctggccgccgcccacgccgatggtcgcgtggcccttcgtgatggcgatggcgttggacttgatggacttgcacaccttccacgcgaacagcagctcggcgagctcttcctcgctgggctggcgcttcgtgggaaccgtgaacgtcgcgggatcctcggccacggcgtcggaatcctgggccagcaggccgccctcgaccgagcggtactccacttccccgccggccgggttcacgccgcccgtggacagcaggcgcgcgttcttcttcgcgctgtacatgtcaagcgcgtcgcccgcgaactcgggagcgatgatggcctcgacgaactgcttgttgtcgaagatggccaccaccacgtcggaggtgacggggcggttgaacgccatgacgccgccgtaggcgctcaccgggtcgcacgcgtgcgcgcgctggtaggcctcgacgaggtcgtcgttctggcacacgccgcagggcgtgaggtgcttgacgatgacgcaggccggctcgtcgaactcgcgaacggccgtccaagccgcgtcgaggtcgaggtagttgttgtacgacagctccttgccctgatgctgcttggcatgggccaggctgtgcggggcgtcggcgtagtcgtcgcgacggtagaacgcggcggactggtgcgggttctcgccgtagcgcaggtcttgcaccttcgagagatgcagcgtgcggtcggcggggaacttcacgtcgccctcgtccttgagctgggcgcccatccacgcggcgatggcgccgtcgtaagccgccgtggtctcgaacacgtcgagcgccagcttggcgcgcgtgtcgcgcagggtggcgccgtcgttggcgcgcatctcggccaggatagcgtcgtagctcgccgggcgcgtgaccacggccacgctctcgaagttcttggccgcggagcgcagcatggacgggccgccgatgtcgatgttctcgatgcaggtgccgaaatcggcgccgctttccaccgtcttctcgaaggcgtagaggttcaccaccaccatgtcgatcatctcgatgccgtgctcggccgcttgggccatgtgggcctcgttgtcgcgcttggccagcagaccgccgtgcacgcgcgggtgcagcgtcttcacgcgaccgtccatcatctcggggaactgcgtcacgtcgtcgatgggcgtaaccggcacgccggcgtccttgagcgcgcgggcggtgccgcccgtcgagatgatttccgccccgaactcgtcgacaagcgcgcgggcgaagtccgcaacgccgctcttgtccgtaacggacacgagcacgcgcttgaccttaggattgctcatatggccttacatcctttcctcttgtctgcgactgaacggccccttgcgtccaatctcctgcgacgcatggtaccacccgaaccgcgaggtcaacgaggaagcgcgcgcatatcccgcaaacgcgcacgacgaaaaggtcagcgagccccgccgcaaggcgcacgccctcagcggcccaggctcttctcgtggcgttcgcgcgcttcggcgctgtagcgttggcggtagcgcacgtccacgagctcggcgacgatggcgatggccagctcggcgggcgtcttcgccccgaacttcaggccgatggggcgcttgacgcgctcccagtcctcctcggtggcgccggaggccagcaccagctcgcgcacgcggtcgttcttgccggcgcagcccatcatgccgacgtaatgcacgtgatgcctcgtcgcccagacgcagccctcggggtcgaacatgtgaccacgggtgagcacgcacacgtagtcctcgggcgcggcgtccaactgctcgagcgcatcgaagttgccgccctcgagcacgatgcgcttcgccgtagggaagcgcgcttcgctcacgtaggccggatcgtagtcgaccaccgtcacggcgaaacccacgtggtcggcgagcgccgccacttcgctggccgcgtcggacgcgcccagcagccaaacatgcacctggtcgaacagagggacgctcgcccaggtgaggccctcgaactgctcgttgtgcatcgaggggccgcgcgtgacgtccttcatctggaacgtgtcgcggggcgagtacggccgcgacgccacgatctccttcgcgtcgttgcagaagaacacgagcggctcgccgtcggccgagccctcgtcgccgtacttcttcgtcacctcgttgtcggtgttgcgctgagccgcgtccgcatcgtagacgatcttgaaaccgagccaggcgaggtcgccctcctccatcgcgcgcagggcgcgctcgaacgtgggcgcgtcgtcggccgtgaggcttttcgccaccacgtcgagatacgtcggatccacgtgctggttgccttcggtcgcctcgtgcgagaagcacgggaaatcctccacgctcaaggacggcgtgcggccctcgcggagggcggcgatgacggactggagggcttccttgttcatgagggctccttcgaggttcgagctggcgggcatttgcctgggcggacgacaagcttacgcgcggaacggacggttgacctgcgggtttccccgcgggttcatcgggcgggggcgatatggaccttacggtcctcgcccacggtcacgcggccttcggccacgaggcgcagcacttcgggatacaggacgtgctcgacctcgtggatgcgggcttcgaggtcgtcgtgggtatcgtcctcgcgcacctccacggcgcgttgcgccacgatggggcctttgtcgtagtcctcgttcgcgaagtggacggtgatgcccgtcactttcacgcccgcgtcgaacgcgtcttggatggcgtgcgcgcccttgaacgagggcagcagcgccggatgcaagttcagcacgcggtcggggaacgcgtccagcagcacgggcgtcaccttgcgcatgtaccctgccatcaccacgtactcggcgtgcgcgtagcgcagcgtctcggcgatgcgcctgtcggcttcgacggggtcggcgtacacgtcgcggttgagcaccgtgaccgggatgcccgcccgatgcgcgcgctcgatgccgaacgcatcggggcgcgacgacaccacgtgcacgatctccacgggcagcccctcggccgccgcatcgatgatggcttgcaaattcgtgccgctgccgctcagcagcacgccgattttcagcggttcggtcatgcccttacgcctccgcaccgaagccgtacagcttgccgtcgttcgcgtagcggacctcgccctcgcccgccacgatgcggccgacgcggtacgtggtctcgccggcctgcgtcagcgcggcctccacctcgtcggcgcgcgccgcgtccacgatgagcaccatgccgaggcccatgttgaacgtcttgagcgcctcggcttcgtcgaggtgcgccgcgtcgcacacgaacgacgcgatggccggcaccggccacgtgccgaggtccacctcggcggcgcaggtcttcggcagcgcgcggtcgaggttctcggagatgccgccgcccgtgatgtgcgcgagcgcgtgcacggcgccctcgcaggcctccagcacggcgcgcaccggcttcacgtagatgcgcgtgggctccagaagcgcgtcctggaggctcgcgccgcccagctcctcgcgctcgatgcgcagctcgtagtgggtcttcccctccacgcacaccttgcgcgccagcgagtagccgttggaatgcaggccgctcgacgcgaggccgatcagcacgtcgccttcgcgcacggtggccgggtcgagcatcttcgtgcggtcgaccacgcccacgcagaagccggacaggtcgtagtcgtcggggtccatgacgccggggtgctcggccatctcgccgccgatgagcgcgcagccggcctgcttgcagccctcgccgatgcccgccacgatctcggccacgttctcggccttgagcttgccgatggccacgtagtcgaggaagaacagcggctcggcgcccgtggcgaggatgtcgttcgcgcacatggccacgaggtcgatgcccaccgtgtcgtgcttgccggccagctgcgccaccttgagcttcgtgcccacgccgtcggtgccgctgaccagcagcgggtcgtccatgctcttggccgccgcgatggagaacaggccgccgaagccgccgatgtcgcccaccacctcgggacggtacgtgtcgtgcacgacgcccttgatggcttcgacggcgcgcgcgccctcggccgtgtccacgcccgcctgcgcgtaggtcaccgcgtcttcgtccatccagctgggcatgtgcgggccgtcgtcggtctgcgtcgcgcttacggtaattctctcagtcatcttggctccttgtgccgtatcgtccaggtcggggcgatcccccactgtcatgctgctgtcgtgcgcggcgcgcctagcccgtcgcgtcttcgccgtacgtctcgtcgaaatccttcttcgtcaggaagctcctcttggccaccgcgtcggggatggccaccgggtagtcgccggtgaagcacgcgtcgcagaacccctggcggcgggcgtcgggaacggcggcgcgcaagccctcgagcgagatgaaggccagcgagtccgaaccgatccacgcgttcatctcgccgaggtccatgttcgcggcgatcagctgatcgcgcgtgtcggtgtcgatgccgtagaagcacggccacatcacctcggggctcacgatgcgcaggtgcacctccgccgcgcccgcgtcgcgcagcatctgcacgagcttcttcgacgtgttgccacgcacgatgctgtcgtcgatgaccacgaggcgctgcccctcgataaccgagcgcagcgggttcagcttcaagcggatgcccagctggcgcatggcctgggtgggctcgatgaacgtgcgccccacgtagcggttcttcacgatgccgtcggcgtacgggatgccgctctcaaacgcgtagcccagggccgacggcacgcccgagtcgggcacgcccagcacgaggtcggcctccacgggggcctcctgcgccaggatgcggcccatgctgcggcgggcctggtacacgctctggccgtcgatcacgctgtcggggcgcgcgaagtacacgtactcgaagatgcacgccgccgacgcccgggcgggaactccctgctcggcgtacatgccgtcgcggttgaagcgcacgatctcgcccggctcgacgtcgcgcacgtactgcgcgcccacgatgtcgaggccgcacgtctcgctggacactgcccagccgcggccgtcgggcagcgcgccgatgcacagcgggcggatgccgttcgggtcgcggaacgcgtacagcgaatcggggctggccagcaccatggcgtaggccccctcgatatcctccatggcgcggcggatgccgttgcgcaggtggtgcgtttcctgggtcacccggccgattgccttcgccgccacctcgctgtcggtgccggaacggaactgcacgccctcgtcgacgagatgggcgcgcaaggcgttcgtgttgacgagcgtgccgttgtgcgcgagcgcgatcagcacgtcgtcgatggccgagatgtgcggctgcgcagcctcccacgacgcggcgccgccgctcgtggagtagcgcgcgtggcccacggccacgaagccctcgagcgcggccaggcttgcttcgtcgaacacctgggtcacaaggccgaggtctttcgacaccatgaccgtcgcaccgtcgcccacggcgatgccggcgctctcctgaccgcgatgctgcagcgcttgcaagccgaagcacgtcatgcgcgccacgtcttcgccgggagcgaacacgccgaacacggcgcactcctcttcgaggcggtcggggcgctcgcccggcaggatggacgtgctcatgaagcgatctcctgttctgcggaatcgatggccgcgacggcatcggggtcgatgacgtcgccgtcgccctcgcccaccgtgctggccttcacgtacgaatacagcacgtaacgcccgtccgacggcagattgtcgcacgtggcaagggcgaaggtgtgtttgatatcggaagcagcaggtatgtcggaagcgggcaccaccgatcggtcgatcttgtcctgcacgtaggccacgcgttcgtcctcatcggcgaaccgcatctgtgccaacggatcgtcggccgccacatgcacgagcgcgaacgtgctcagctcgtagttgccctcaggcgtgaggatgtacaccgtgcgatggtcgttgaactgggcggcatcgctgaaatcggcgacgcaggcgaacatcgagccgtcgttcagatgatggccgtagatgatgttgttcgggtcggagaagtcggagctgttctcggccgccaggaagatggcgccgaacgtggcgatccagccttccgatcccttgaagtcgtgcgtaaggtacttctcgtcgtcggccgcttgcacgatggggtagttcaccacggtgccgggaatgtagatccaccccaccgtgtcgggattgatggccttgagcgcatcccagtccaccgtgaagtcggcgagcgacgtggccgacagatcgtcgggcggcgtgaaaccctcccgcgcgacatcgttataggtttgctgaccctgccagtaactgaagccgatggcaccgagcgcggccagcgccacgacgaacaccacgagcgcgatccagaacaccacgcgccacggcccgctcttcttccgaggccgtccggaaccgggctgctgataggtcggttgctgtcgatacgggtagcctccgcctccagccgatctgcgctgggcaggctgagcggagcggtaggcggcatgctgcgcggtggccggccggtaggcgcccggttgcgcccctgcccgcacgtcgggcgcggcgcccctcggcacgcgctgctgcgcaggtcgcccgcttggagcagggccgggatgctgtcggtactcggacatgttcacctttcgggatgatcttcaaacggcggaaccccgccgtcgccagaccgttaccataataaacaaacgcccccatgatgggggcgcgatgttcgcaaaaacgcaattttcacgatagggaccgctgttcgccgaagcggctacttcttcatctcgtcgatgaagcctttcgcgatgaagccgacgatgacgaggacgatgatcgcgacgatgacccagatagcctccatgggcacggtgattccgaacagagtcatgactgtttacccctttttttcgttcaagcgcgcgaatgcgcacggtcgtttcgagtactgctgcccatagtaacgcgatctcagttttcgcgcaagcgcgcttccagggcgtcgttgataattttgagcgccttgacgcgcgcgtagcgcttgtcgtcgctctcgaggattatccagggggcgaacggcgtgctggtcaagcggaagatatcctcgaccgcggctttgtactggggatacttgtcgcggttgcgccaatcctcatcggtgatcttccactgtttcgcaggatcttgctcgcggtcgcgaaagcgtcgcaactgctcttcgggactcacgtcaacccagaacttcagcaggatggcgccccaccgcaccagatcgcgctcgaattcgttgatctcgtcgtacgcccgcgtccattccgacaccgaagcgaaaccttcgacgcgctccacgagcacgcgaccgtaccagctgcggtcgtagatgcccacgtggcccgccttcggcagacgcgtccaatagcgccacaggtgcggatgcagcagctcgggcttcgtgggggcgggactgggaaaaatggtataggcgcgggcgtcgagcgcttgggccacgcgcttgatgttgccgcccttgcccgcggcgtcccagccttcgtacatgatcatgagcgggatgcgcttctggtacatctccatctccagcctgttgaggcgctcctgctgggccttgagctcgaccttgtacgtctcggggtcgagcgcgagcgcgtggtcgacgctctcgaggcacggcgggtcgtccacctgacggaacctcgaaacgcgcggagcgcgggcggaagcagcggctgcggcggcttccgcctcctcgcgcacgcgcgcctcctcttcgggagaacggccgaacaggggcgcttcatcgagagcgccggcggagttggcctgcgccttggccgccgctacggcggcttcggcgtcgggcgctgcctcgaacgcgctcgtaagcgcgttcaccagcgtctcggcgatctgcaggttggcgcggcgcttgtcctcgccgttcacgagatgccatggggcgaacgagaagtcgctgcccttcagcaggttgtcgtacaggcggtacgcctcctcgtagttgccgatggtggccagcttgtcctcgcccacgcgccagcgcgtggccggatcgtcatgcaggcgcgtgaggcgcttcttctgcgcctccttcgtgacgtgcacgaagaacttgaccacaaggtaaccgtcgtcggctagctgccgctcgaaatcggacgcagaggtgaggtagcggcgcagcacgtcgatgtggcgttcgtcgcgcgcctcggccatggcggccgcgacggctttctggcccttgcgcttggaggctttcagggagagcttgccgaactcggtgtacagcatgtgctgaacggcggcggtgtaccagccgcggtcgaagaacgagatggtgccgcgctggcccaggctcttccagaactcctgcatcacgggatagaagcccgttacgccgctcttcgcgcccgcgaacgcgcgcgcggctttcacgtcgaggttttcagtgacgtacacgctggtggcgcgcgcgtcgaggtggtacatgagatcggagatgcggctgcccttgccggcgccgttccatccttcgaacagcaccaccaggccgacgccctgcacgcgcgcctgctgctgcagcaccaccaatcgctccatcagctcgtcccgacgcgccttgtaggcgtccttcgagagcggttcgcgtgagaaatcgacggtttccagcatggcgcttcctttccttcgagaagctcatggtaccacaaggatcgcgaagaaccggaccgccatcctgcaagggccggcccatcgccacccgaacgagcgaaccagaccgtcgtcccgagcgcaggcgataaaaagtaaaatccagctttcagttcgcgctcggcctggccgcgaccggcgcggttcactacaatgaagcgatggagcacatcgcggatcgccccgggcgagccgcttgatttcggacggactatgccatgcccaactacgcggtggtcgacctcgggtcgaactcgatacgcctcgtcgtctacgacgtgaaagacgcgcataagcgcacgtgcacgaacaaggatttcaagagtctcataaacgacaaggtgatggcgggcttgtcggcctacgtcgtggacggggtgttcacccaggacggcatcgaccgagccgtcagcgtgctgcgcggacatgcgaagcgcgcacggtacttcgattgcgagaagatggaggtgttcgccaccgcggtcatccgcaacgccttgaactgcgaggaagccgtcgcggccatcgaggaggcagccgagctgcccatctcgctgctgtcggctaccgacgaggcgcacctgggcttcgtcggcgccacctgcgaccgcgcagtagagcggggcacgctcgtcgacataggcggcggctcgaccgagctcacacgcatcgaaagcagcctcgatttcgacaacgcgagcatcgggcaagggtcgttgtcatcgttcgcccagcacgtacgcgctatcctgccgacccccggcgagatggacgccatagccgaagcgttccgcaagcgcttcgccggtctgcccgaccccgacgcgtaccgctcggaagcgctgtacggcatcggcggaagcgtgcgcgcggccgccaagatgcatgctcaagccaccggcgcggccgtacgtccgaaaaccatgacgaaacagcaaattcatgcgatacttgcatggtgccgcaccgatcccgacacgttcgcgcacgccgcgctcaaggcttcggccgagcgcgtgcacacgctggtaccgggctgcatcatcctcggcgagctgttcgacgcatgcggagccgagcgtctggacgtgtgcaagtacggcgtgcgcgaagggtacctgatcgaccgcatgctgcggtagcggcgcgcaggaagcgaacgtttacgggaaggggacgttcatggacacagccaagaaatccacgaccagcaccgccgagactcctgccggccaagcgccggacgctctcgcggaaacgagcgcggacgagatgcgcgcgtcaatcgacaaagtcgagggcgcaaacccctccgtcgagggcgaaccgagcaaagaatcctacttgcagaaccgagagctgtcatggctcacgttcaacgagcgcgtactcgaccagggagccgacgagacggtgccgctgctcgagcgcctgaacttcatctccatcttctggagcaacctccaggagttcttcatggtgcgcgtcggcagcctgaccgacctgtcgttagtgaagaagcacatcatcgactcgaagtccggcatgacgcccgccgagcagctcgacgccatctacgcgcgctgccacgagctgtaccccatccaggaacgcacctacgaaagcgtgcggaaacagctgtgcgcgcgcggcgtgtgcagcctgcgccccgaagacctcgacgacgagcagcgcgccttcctgtccgattacgtgcacaagaacgtgatgccgttcctgtcgccgcagatcatcaactcgcgccatcccttccctcacctggagaacggcgcgctgtacgtggtactgcgcctcaacgaggagccgggcgcgaagaagaaggcggcgaagaccaaggacggcgaaaaggcgcccaaggaggagaaggggaagaacctcggagccgagggcgtgacgctgggcctcgtccccatgccgcgccaatgccagcgcgtgatcgcgctgccgggcgaaggactgcagttcatcctgctggagcacgtcatcgagatggtggcgagcgagatattctccatgtacgccatcaagcacacgaacgtcatctgcgtcacccgcaacgccgacctcgacgccaccgaaggcaccgacgagagcgacgaggactatcgcgagcacatgaagcgcatcttgaagaagcgctcgcgcctggcgccggtacgcctcgaaagcgaacggccgctgtcgcccaccttggagaagctgctgctcaagcgcctgaacctcaagccgcaccaagcttacgtcacgaaggtgccgctcgacatgagctatacgtgggggctggccggccatctgcctgaaaccgcgcgcgcggagctgacgaacgtaccgttcacgccgcagtggcccggctgcctcgaccgcaaccgtcgcatcatcgaccaggtggccgagaaggaagtgctgctatcgtacccgtacgagagcatggacgccttcgtgcagcttctgcgcgaggctgcgaacgaccccaccgtcatctccatcaagatcacgctgtaccgcctggccagccaatcgcatctagccgaggcgctcatcgcggcagccgagaacggcaaggaggtgaccgcgctgttcgagctgcgcgcccgcttcgacgagagcaacaacatcgaatggtcgcagcgcttcgaacaggcgggatgcaacgtcatctacggcttccgcgacttcaaggtgcactcgaagatatgctgcatcacgcgtcaaaccgaccaggggctgcagcacatcacccagctgggcaccggcaactacaacgagaagacggcgaagctgtacaccgatctgtcgttcatcaccaccgacgagacgttcgggcgagacgcaaccgagttcttccgcaacatggggcttgagaacacctccgacaactacgacatcatgtgggtggcaccgttgcagatcaagccgatgatcctcgctgggatcgacgcgcagatcgaacgcaagaaagccggcgagccgtgcgggctgttcttcaaaacgaactccatcaccgacaaggacgtgatcgagaagatcgtggaggcgtcgcaggccggcgtgaacgtgacgctgttcgtgcgcggcatctcgtgcatcgtgccggggctggaaggctacaccgagcacgtgcgcgtcgtgtccatcgtggggcgcctgctggagcacagccgcatctacggcttcggcccgcgcgacaatatgaaggtgtacctgtccagcgccgacctcatgacgcgcaacatggacaagcgcatcgagatagcctggcccgtcctcgacagcgaactgcgcgagcagatcctcggatacctcgacgtgagcctgagcgacaccgccaaactgcgtgagctcatgcccgatggcagctacacgccgctcggcgcgttcgcgaaagaagacgccgacggcgagaccgtgctgttcgaatcgcaggagttcttcatcaagcgcgcgcagcagcgccgcctggaagcagccgaggacgaagcggcgcgcgatgctgctcggcgacgttcggcccagctgatggcggcacacgagatgaccgaggacgaggcgagcatccgcgcggaggaacgcgccgcggctgcggccgcgcgcgaggcggaagcggctgcggaagccgccgttcaggcatccgtggccgcatcgtcccggatcgcgcccgcaaccgcgcccgctattccggtcggccctgccaccgccccggcactcgaagccgacgccatcgaacctcctgtcggcgagcgcccgtgcgccgagcagggcatggtggcagccccgcccgcaacgcgcggtgcgaagaagccgagcctgctcgtgcgcttcctcagcctgttcgtgcgataagagcacgctccctctcgcatgaaaacgccctcggctcttcggagccgagggcgttgctttcggatgatgcggcaggagcgcagtccgaggatgccgcggtcgaccggcgcgcatatcgcggccgcgtccctgtcgcaacgaccacgatcccatgaagcgcgcgagtgcgcaagaggccgcagctgagcgttgccgccttgccaccctcccgctactcgcctttcctcatcggcccgacgtatttccagaagcgttccggatcgcagcagaagcacagcacgcgacccgactcggcgtcgaagcggtagccggcgctttcgaagacgaagcgccattgcttgatcctgcctgcgatgatcggccgaacgcgaacgtggcggcaccccgtcaaacggggcgcctgcaacgaaaaccggagaaatctcctctgtccatgacttatgcgcacctctgccacgccgaaacggccttttcagacgacgcggcaaagcgtcgcccaataaaaggcctggtcaaaagttagctatgaaatacttcgatcgcgcaggccgcttccgaggtgcacataagtcgcgtacatggtgctttttgggcgttttcgatggcagaggtacgcataagtcgggaacttgcccgcacgcagggggggggcaaccctgcttgcttttcgccccgaagcgcgcactacgcaatagaaggatcccgaatacggcaccggcagaaagacttcctgctgacgccgcacgggatccttcgcgtccccgcttcgcggggcctccctgcgctcgcttcgcgtgctcgggaattctacagtccgctggactgtcgaatgcttgcgctcgctcaggatgacagcggaatcacgcctcgcgctcaaccacggcggcgatggcctgggcgtggcggtcggcctcctcggcgctggcggcctccaccatgacgcgtaccaccggctcggtgccggaaggacgcagcagcacgcgacccgaatcgcccagctccgcttcggcagcttcgacggcggcctgcacagccgcattgccgtcgacggcgtgcttgtcgttcacgcgcacgttgatcagcgtctgcgggaaacgcgtcatgacgctggcgacatcctcgatggaagaaccggcacgccggcaagcggccaggaactgcagggcggtcaccaagccatcgcctgtggagttgtgctcgaggaagatcatatggccgctctgctcgccgcccaagatgaagccgccctcgcgcatggcctccagcacgtagcggtcgcccaccttcgtctgaacgagctcgatgcccgcatcgcgcagagcatgcgagagcccgaggttgcacatgacggtggacacggcggtgccgccggcaagcagcccgcgcttgtgcaggtcgatagcgcacacggcctccaccacgtcgccgtcgatctcgttgccgttcgcgtccacgagcatgacgcggtcggcgtcgccgtcgtgcgcgatgcccacgtcggcgcccgtctcggccacgagcgcgcgcaacggctcgagatgggtggagccgcactgcacgttgatgtcggtgccgtcgaagtcctcgttgatcgaaaccacctcggcgcccagacggcgcagcgcctcggcgctggtcatgcaggatgcgccatggcctgcgtcgagcgccaccttgaggcccgcgaagtcgatgccctcgccggccaccgtggacaccgcgtgcgcgatgtacagctcgcaggcgtcgtccaccggcagcgccacgcccacctcgtcgccgttcggcagctcgtccgccgacgggccgcccgccgccagataagcctcgatctcgtcctcaaccgcatccggcagcttgaagccctggccgtcgaacagcttgatgccgttgtactcgggcgggttgtgcgacgccgagatgacgatgccgccgtcgcagtgcagctcgcgcaccagaagcgcgatggcgggcgtcgggatgatgccggccaggagcgccgtgccgcccatcgacatgatgccggacgccacggccgactccagcatgtcgccggacaggcgcgtgtccttgccgatgaggatggtcttgccctggaaggccacggcggcctgacccagcttgaaggccgtctcgcacgtcagctccttgttcgcgacgccgcgaaccccatccgttccaaataaacgtgccatgctctttcctttccagcaggttcaacaaagtaagcggggctttcgaagcggcggaaaaccgccggaaggcctacttccctcgtttcacgtgatcttcgtacaagcgaacgccgccttcggggcgttccgcgtcggtcatgcggttgttcagctcggcggcgaactcgtcgaggccgataccgtagcgctcgagcaccacgagcaggtggtacaccacgtcggccgcctcgtaacgcagatggtcgatggccgcgtcgtactcgggcggcagatcgacggccagcttgtcggcctcgtcgacggtgccgctcgccgcgatcgacgccgccagcgacgagcatgcccacgactccacgtccttcgccgcaagcgccgtctcgcccgcctcctccatgactttcttcagcaccacgtcgggagagccggtgagtagacgataggtgtagctctcctcccccgcctcgcgacgtgccgcgatggtgcctgcaagcgcctcgagcgtcgccccgatctgcgacgaaagcaccgtctcgccggaaggaatataggttttctgagacatgatgctcctcctacaactaagcaaaccccgcaggtagaacccttctccagcgagtcccggtctgaccgcctctcgcaggtcgcagccgcacccgctggcgccgcacgggatccttcgactccggcagctgcgccgcctccgctcaggatgacaagagactcgcgaaggagggtgcgacgcggtgcccaccaagcgagtttcgcacgagccgaaacgtccagcggacgtttcgtgcgagcaggactgtctgagcgactgggcattgcgccgcatcctccgccacaagagccgcaagcaaagggggcgcgccaagcgcgccccccaggtcgaacttattcctcgacgtcgtcgtcggcgttggaagcttcctcggactccttggtggtcaggccgaagccgagcgaccctaccgagcccagcagagcgtcgagctcttccaggttgcgctggtaggagcgcggcggcaaagcttcgcccagcatgtcctcgccctcggtgttgaaggtcgggggctcgtcgccgccgatgaggatggtgtcatcgggcgagaacaccatgtccagcagctgcgacatgtcgtcgctcgtagccgcgaggtcgtcctcgatcacgtgcgtcagatcgtgggcctcgaggccttccttcagctcctcgatggctttcacgccgatgccctcgatgcgcagcaggtcctcctcggtgtggcccacgaggtcggctaccgtctcgatgcccgcctcggagaacttgttggcccagcgctgcgacacgcccagatcgtcgtagatgtacaggcgcgcgtcctcgtcggacagctgcgggccgcggtggcccagcgacagcccgctgtagtagctgccgtagttcgtgcccatgttgaggtagccgtctccgtcgagcgaccagtcctgcggctggggcagcagctcctcgatgtcgcgaagcgcttccggcgcgaagtcgggcagcgtctcacccaccaccggcgcaaccggacggcccttgtaggtgaggcccacttcgcggtaacgcgacagacccgtgcccgccgggatcggcttgccgatgatgacgttctccttgaggccggccaagtggtcgatcttgccctcgatggcggcgtcggtgagcaccttcgtcgtctcctggaacgaggcggccgacaggaacgaatccgtggccagcgacgccttcgtgatgcccagcagcagcggctggcccacgggcggctccttgccttcggcgatgagcgcgttggcggcatcctcgaactcgaagcggttcacctggcgacccggcaggaagtcggactcgccggcgtccatgacggccaccttgcgcagcatctggcgcgcgatgacctcgatgtgcttgtcgttgatgtccacgccctgggacacgtacacgccctggacctggctgacgatgtagcgcagcgtcgtgttgggatcggtgaggcgcagcaggtcgtgcgggttcaccgagcccttggtgagctgctggcccaccttcacttcgcagccgtccgtcacgccgggcagcatctgggcgcgcgccgacacgacgtactcgcggaagttgccctgctggtcgtggatcgtgatggtcttggactgcttgtcgcccgagatctgcagcgtgccggagatctccgcgaggacggcgaggcccttgggcttgcgcgcctcgaacagctcctggacacgaggcagaccgtgggtgatgtcctcgccggcgacgccgccggtgtggaacgtgcgcatggtcagctgggtgccgggctcgccgatggactgggcggcgatgatgcccaccgccgtgccgatgttcaccggacgcgacgtggcgagatcccaaccgtagcacttctggcacacgccgtgctcggcatggcaggtcatgaccgtgcggatgacgagcgtctcgacgcccgccgcgtccatggccttgagctggtccatatgggtgatgtactcgcccgcggccagcagcacctcgccgtcgacgcccgccacgtcgttgagcaggcagcggccgatgaggttctcgtcgacgtcgcccttctcgttgtgcagcgggtacggcacgccgtcggcggtgccgcagtcgatctcgcggatgatgacgtcctgggccacgtccaccagacggcgggtcaggtagcccgagtcggcggtacgcagcgcggtgtcggccagacccttacgggcgccgtgcgtggagatgaagtactccagaacggacaggccctcgcggaagttcgccttgatcgggcggtcgatgatctcgcccttcgggtcggacatgaggcctcgcataccggccagctggcggatctgcttgatgttgcctcgagcgccggagaacgccatcatgtagatggggttgaacttgtcgaagttctcggccatggcctcgccgacttcttcgttcgcggcgttccagatgtctacgacctgcttgtggcgctcgtcggggctcatgaggcccatctcgtagtcctcgtcgatggccgcgaccttctcgtcggcggcagccaggatctcggccttgttcggcggcacggtggcgtcgtacaccgaaacggtgacgccggcacgcgtggcgtagtggaagcccgcgtccttgaggccgtcgaggatcgccggcacgctggacagctcgtagcggttgcacacgtcctcgacgaggcggctgatctccttcttgttcatctcgtagttgaggtacggatagtcctcgggcagcacgttgttgaacgtgatgcggccgatggtggtctcgatgcgctcgcccgccttgtgctcctcgaacacgccgaaagccgtggccacctgcgtgtccttggtcagacgcacccagatcttggcctgcaggtcaagctcggcgcgcgcgtcgtaggcgttcatggcgtcgtcgaagtcgatgaacgagcggccctcgccctcgaagccgtcgcgggcggccgtgaggtagtacaggccgatgatcatgtcctgggtgggcacggtcagcggacggccatgggccggcgacttgatgttgttggcggacagcatgagcacgcgggcctcggcctgcgcctcggcgcccagcggcacgtgcacggccatctggtcgccgtcgaagtcggcgttgaaggcggtgcagaccagcgggtgcagcttgatggccttgccctcgaccagcaccggctcgaaggcctggatgcccagacggtgcagggtaggtgcgcggttcagcagcacgggatgctcggtgatgacctcttccagcacgtcccacacgtagctggcgccgcggtcgacggcgcgcttggcggccttgatgttggcggcgtactccagctccaccaggcgcttcatgacgaagggcttgaacagctccagcgccatctgcgacggcaggccgcactggtgcagcttgagctgcgggccgacgacgatgaccgaacggccggagtagtcgacgcgcttgcccagcaggttctggcggaagcggccctgcttgcccttgagcatgtcggacagcgacttcagcgggcggttgcccgggcccgtgacaggacggccgcggcggccgttgtcgaacaggctgtcgacggcctcctgcagcatgcgcttctcgttgttgacgatgatctcaggcgcgccgaggtccagcaggcgcttgaggcggttgttgcggttgatgacgcgacggtacaggtcgttcaggtccgacgtcgcgaagcggccgccgtccagctgcaccatggggcgcaggtcgggcgggatcaccgggatgacatcgagaatcatgtccgtcggcttgttctcggacttgaggaacgcgtcgaccaccttgaggcgcttgatggccttggcgcgcttctggcccttgccgttggcgatgacgtcgcgcagctcgtcggccgtcgcggccaggtccatggcgtccagcaggtcgcgcacggattcggcgcccatgccgcccgtgaagtagtcgcggtagttgaggcgcatctcgcggtagagggcctcgtccggcaccagctgcttcggctcgatcttcatgaaggcgtcgaaagcgtcctggcgcagcgccttgcgctcgttgaactcctcgtagatgtcggcgatctcctcgtcgacctcctcggccgtcatgcgctcgtcctcgtccacgtcgtcgacgaagccgtcgtcctcgggcacgtagtccacggacagcttgcgcgtggcctccacgaggcggtcgcgctcggcgtccagctcctcgaggtcggcggccagctcgtcgcgcagctcgtcggcgtcctcctcgcgggcctctttatccaccgaggtgatgatggaggatgcgaagtacagcaccttctccagctctttcggtgcgatgtccaagaggtagcccagacgcgagggcgagcccttgaagtaccatatgtggctgaccggggcggccagctcgatgtggcccatgcgctcgcggcgaaccttgctgcgcgtcacctcgacgccgcagcgctcgcagacgatgcccttgaaacgcacgcgcttgtacttgccgcaggcgcactcccagtccttcgtcgggccgaagatcttctcacagaacaggccgtccttctcgggcttgagggtacggtagttgatcgtctcgggcttcttcacctcgccgcgcgaccagctgcgcacgtcctcggcgttggcgagcgagatgcgcagggcgtcgaaattgctcacgtcgaattccgtcgtcatttatcgctcctctccctcaccgatcaggtcgttcgtatcgttgttgctatcgcccatcagctctcccagctcggcggcaatgctgtcgagcgcattggccgcgtcgtcttcttcggtcttgcgcgcgtcggccgcgatggcctcgtacagcgcgcgatcgccgtcttcctggccgtcgatgtcctgggtcacgtcgatcgtgcgatgatcgtggccctccagctcgacgttcaggcacagcgacttcatttccttcacgagaaccttgaagctctcgggcacctcgggggcggggatgttctcgcccttgacgatggcttcgtaggacttcacgcggccggcggtgtcgtcggacttcaccgtgaggatctcctgcagcacgttcgatgcgccgtacgcgtacagcgcccacacttccatctcgccgaaacgctggccgccgaactgcgccttgccgcccagcggctgctgggtgatcaggctgtaggggccggtcgaacgcgcgtggatcttgtcgtccaccatgtggccgagcttcaggatgtagctctggcccacggtgatgggctcgcggaacttctcgcccgtgcggccgtcgtacagccacgtcttgcccgtgcgggacagctgcggcacgaactcgtcgcgcgccaggtcgccgtacgtggcatggttcttgttgatgaggttgcggttcgccttctcgatggcatcggagatctccttctccgtggcgccgtcgaacaccggcgtggccacgtgcatcgggccctccaccacggcgtcggtttcctcagcgtcgtcccagccccacttcgcggcccagccgaggtggttctccagcagctggcccacgttcattcgggaaggaacgcccagggggttgaggatgacgtcgatgggggtgccgtcggcgaggtagggcatgtcctccaccggcagcacgcgggagatgacgcccttgttgccgtggcggccggacagcttgtcgccctgctgcaccttgcgcttctgggccacgtagatgcgcacgagctcgttgacgcccggagccagctcgtcgccagcatcgcggctgaagcggctcatgccgatgacgcggccgccggagccgtggggcaccttgagggacgtgtcgcgcacctcgcgggccttctcgccgaagatggcgcgcagcaggcgctcctcggccgtgagctccgtctcgcccttcggcgtgaccttgcccaccagcacgtcgcccgggaatacctcggcgcctacgcggatgatgccgtcggcatcgaggtcgctgatcatgtcgtcggagatgttcgggatctcgcgggtgatctcctcgggacccagcttcgtgtcgcgcgcgtcgacctcgtactcggagatgtggatggacgtgagcaggtcttcggcaaccacgcgctcggacacgatgatggcgtcctcgtagttgtagccttcccacggcatgtaggccaccatgaggttctggccgagcgcgagctcgccgccgtcgcagctggggccgtcggccagcacgtcgcccgcctgcacctcgtcgcccttgcggacgatggggcggtggttgatgcagcccgactggttggagcgctggaacttcggcacgaggtactcgtcgtactcgccgtcgttgttcagcacgatgatggtctggccgtccacgtagtcgacgacgcccgggttctgggcgaccaggatctcgccggagtcgaccgcgatgcggtgctcgatgccggtgcccaccagcggcgcgtcggggcgcagcagcggcacggcctggcgctgcatgttcgagcccatgagggcacggttcgcgtcgtcgtgctcgaggaacgggatgagggaggtggccaccgaaaccatctggcgcggggacacgtccatgtagttcaccagctcgggcgccacctcgtcgggctcgccgaacacgccggcggcgtccttcgtacggcagagcacgcggacggcctcgtggaacacgccctggtcgtcgaacgtgccgaacttgcgcgtctcggggtcgaacaggtcgttggcctgcgcgatggtgtagttctcctcctcgtcggccgtgaggtagtccacctcgtcggtgaccttgccgtcgacgacgcggcggtacggcgtctcgatgaagccgtaggggttgatgcgggcgtaggtggccagcgagccgatgaggccgatgttcgggccttcaggcgtctcgatggggcacatgcggccgtagtgggacgtgtggacgtcgcgcacctcgaagccggcgcgctcgcgggacaggccgcccgggccgagggccgacagacggcgcttgtgcgtgatgccggcggcggggttcgtctggtccatgaactgggacagctgcgaggagccgaagaactccttgatggccgccacgatggggcggatgttcacgaggctctgcggcgtgatctcgtcgggctcctgcatgctcatgcgctcgcgcacgacgcgctccatgcgggacaggccgatgcggaactggttctggatcagctcgcccaccgtgcggatgcggcggttgccgaagtggtcgatgtcgtcggtctgcacgccctcgtcgccggcgtgcagcgccacgatgtactgcatcgtgcgcacgatgtcgtcgtcggtgagcgtggaggcctcgtagtcggggtcgaagcccagcttcttgttgatcttgtagcggccgaccttcgccaggtcgtagcgctgcgggttgaagaacagaccctccagcagcgtgcgggcggaatcgatggtgggcggctcgccggggcggaagcgcttgtacagctcgatcagcgactcttccttcgtggtggccgggtcgcggtcgagcgtgcgcagcaccatctcgtcgttgccgaggagctcgatgatctcctcgcgcgtctcggccaggccgagagcgcgcacgagcagcgtcgcgggctgcttgcgcttgcggtcgatacgcacggacaggatgtcgcgcttgtcggtttcgaactcaagccacgcgccgcggctggggatgaccttcgcgttgaacagcgtcttgtcggacgccttgtcgcgctcggaggcgaagtacacgcccggggagcgcaccagctgggagacgacgacgcgctccgtgccgttgatgatgaacgtgccgcggggcgtcatgagcgggaagtcgcccatgaagacgtcctgctccttgatctcgccggtctcgcggttgatgaagcggatttccacgaacagcggtgcctggtaggagacgtccttctccttgcactcgtccacggtgtacttcggctcgccgaactcgtggcggccgaactccacgcacatgtccttggtgttgttctcgatggggctgatatcctggaacgcttgcgccaggccctcgcccttgaaaaactcaaagctgtccgtctggatggcgatgaggttggggacgtccatgacgtccggaatcttcgcaaagctgcgccgatccctgtaaaggctggtctgatcagtcgtttttccttgagccacgaggcttttcctccttcatgtgcacccgcatttctgcgaaaaagtcgcaattgcctaagatatgtcgaaagtcaaggcgagtcaagaaaaatttttacgaactgtggaaattctttgttgatttgcccttttatctgggagaatgcaagtatggtttcaggccgatcccgacatcgggacggcatcttcggtcgattcgaggctccgccgacgctatgcgagctggatagctttgccggttcaagaccccttcgacgaattccgagctggaaagccccgcaaaaaaagtcgctgacttggcgaaacgatgatcttcatcatcaggctcacctccctgctgaagtttgttttgtttgtcagggagctgtggaaacgggctatcgggacttggctccgcccgcaatcgcgtgcgagacttaagtttcaacgcgcccgcgggcgcgcaaacacactacgaacgcacttgaaacgcagcatacttgcagaaccaggaggtcctcatgggacaatccactacgccgaaggcgctcgccttgggcgtttcgctctccctcgcgtgcggcctgctgccgggcgcggcctttgcggacgaagccccagaagacgatgcgtccgccaacgccgccgattccgctagaggaacggccggcggcgccgactccgccccttcgggcgcggccgccaagcccgatggctacgataaagccgacttctactccgacaaccccgtcgcgccaatcgcacggacgctggccgtcccgctggcagccaacacgcagctgcgcagcctctcgaacgagatgaagtacttcgcccgattcgagagcaaccagaactacgaccaggggctctcatggggcgatggctaccatgcaatgggctactatcaattcgacaaccgatactcgctcaaaagctttatttcctattgctacaatttcgacccggtcaagtactggatgttctcctgggttcccagcgcgaacatttcgggagacctgtacgacgggaacgcggatcggctgaccgacatcggccagcaattgaacgaatcctggcatgcggcatacgccgccgaccccgcggagttctcggcactgcaggacaccttcgcatacgacaactactacgtccccgctgaaacgtacctcgcaagccgcggcatcgacatctcgaatcgcgccgacagcgtcaaaggcctttgctggggcctggcgaacctgttcggcacgtcgggatggcacaaattcgtgggcggttggtccgacggctacgtgaacggaacgtattacaacagctacaactaccccggcgccgggctgacgaacgacatgaccgacgaacagttcgtcaccacgctgtgcgattacgtgatagcgcacgtggccgagttctaccacggccagccgcagtaccacgaaggctggacgaacaggtacaaacaggaaaaggagctgtgcctgagcctgcttcccgagaagcccaccgtgcctcctgtcgaggaagagccccctgctgcggattcccctgcggttccgccggtcgggaacacccctcccgaggaaggcagcggagatgcgccttcgggcgagacgaaaccgcccgagagcgtcctgccgcccgaggtgaacccgccggcagcgcccgaagggaacccgccgagcgctccgaacgaacccgccccgcccgcgaacgacggcgccggacaggccgatcccgacgaaaccccgaagccggacggagacagcgcggctccaactccgcctgcatcgccgtcgaaccccgagaacacgacgcctcccgctggatccgaaacgacgccgcccgaggaaacaaagcctccggagagcgcgacgccgcccgaaagcccggaaacgacgccgggatcaggtctgcaagagccgacgaaagaagtggcgaacagcagcaagccctcccttgaagagccaaccgcccctgcgcaggagcccgtcaacctgcccaaggccgacggagacgagaagaacggcaacgaaacagccgcaaaaacctcgaagctcagccagacgggcgacggcaccacgaacgcgccgctcggcgtggcgcttggagcagccggcatcgccgcgatcgcaggcgccgcgctcgccacacgacgcatcctcaaatagctcccctcgttcctgctgcagtcgagcgccccggccgaaaccggggcgctcgactgtagagacgccatgcgacgtcaggcggaatatccctcctccccctctagcgaactgcctcgacgaagaagttccgacaacgagcccgtccgaaaagccggcgaggaatcagcatcgggcgacggcgccctcacggcgactcgacggtcgcgcgacgattcaccgaccttgcgcaattcttctgctgcggcagcgctagagcaagcggccttggtacttttccatgagggcgcagggctggtagctcagcttgttctcgcgcaggccgggcaggccgagatcctcttccaggttgaggtaggtcgccttgtcgacgcagtagcgcgcgagctcgcgcagaagggcgcgccacacgaaacggaagtcgaggttgcccttgagcaccataacgtcgaacgcgccgccgggcagcacgctgccgtatgcgtagccttcgacggtgccgccgatgcgcaagaggatgccttcgaggtcgagctcctcgaagtggttcatgtcgagcaggatctttcgatgctccagctcgagggggtgctcgtcggtgccgcgacggcggctcgtctcgaaccaaacctgctggtaggcgcgcagctcgtccatatggtcgagggcgatgggctcgaaggacgcctcgctgccgtacagctggaagaacttgttcgtctctcggcgcttcttcgccaggcccgggccctcgtaagccgcgatagtcttcgtaaggtagaggtagtcggcgaagttgcggtcggaagagaattcgaaggcacccggcaggtcggcctcgagctgctccttctccttcggcgacaggcccacgaggtgcagcctgcgaccttcggcttgcgcctcgcgcatgagcgtgcgcacgtcgtcggcgatgtcgagcgtgcccagcggcggatagtacgcgacggcgccggggatgcgatcgagctggcgcacgtagagcacgccgtcctcgagcgcgatctgcgttccgtacttctcggtaagcgagtagaggttggcgaacccgagcgcggaatcgttgcggccgagaggcaggagcacgtcgttgacggcggctttatcttccaagtgcagcgttctgaattccatgggcccgcatttcgctcgatcggttgcttcgcagcggaacaggatagcacaagtgggcgccgcctcggaaaacgccatcaacttgcaacgcgaaccgcgccgcgaggggcagtcggggcagccacattaccaatacggtcgttttttaccacgcttctgaccaggagaaacatactgtttcacctgatcataggcttgcgacaagatggcagaaaacgcccggtttggcaacgctcctacccgacgagcgcgcacggcatctttctcgtaaaaccggacatgccctgtccggttctgttcggtatcgtgtcctagtcagcatatccaacgaaaggacacgaaaccatgcactacgaaatcgtcgagcttcccgcacgcaccatcgtcggtcccaccgtccgcgcgtccaacaactcgcccgaggaaacggccgtcatcggccagctgtggcagcgtttcatgggcgagggccttgatcgcaccatccccgaggtgcgcatcgtgccctacggctgcttcgcgctgtactacggctacgacatgagcgatatgagctacgagctgctcgtgggatgcgagacgcccgccgaggcgcccgagggcatggaggcgcagaccatcgccgcaggccgctacgcgaagatcgctatccgcggcggcgactgcgtgaccagcgtccagaaagcctgggaggagatctgggccgacgaggagctgggggcgcagcgcgcgttcaccgtggacttcgaggcgtacctgcccggcgaggacatgtcctgcgccgacatcgacgtgttcgtagcgctcaggtaaacgcgcccgtcgcggaggcggtctcgcgtgcgcgggaccgccgcacctgtcatactggctcgagaccttaaaccgacgaggagccccgatgggacacgactggatcggcgatgtgcccgacgagctgctgcgcgacctgtgcgatcactcgtacagcctcgtgctcggcaagctcacgaagaagctgcagcgcgagatcgccgagcaagccgacgggaactgaaggaggaagcatggcgttcgatttcaagaaagagtacaaggacctctacctgccgaagaccaagcccgagctcatcgacgtgccgcccatgagcttcatcgcggtggccggcacgggcaacccgaacgaggaaaacggctcgtacgccggtgcgatgggcctgctgtacgccttctcgtacaccatcaagatgtcgaagatgggcgcctggcagcccgacggctacttcgactacacggtgcctccgcttgaaggcctgtggtggacaagcgacgaagcgttcgacgggcagcgcattttggaaaaggacgcgctctcttggatctcgctcatccgccagcccgacttcgtcacgcccgaagtgttcgcctggaccgccgagcaggtcgcggcgaagaagcccgagctcgatctgcggcgagcccgcctcgtgcggttcgccgaaggaccgtgcgcgcagatcatgcacaagggaccgtacgacgacgagcccgccaccatcgcgcagatggaggagttcgtcaccgcgtccaggatggtcgacgacatcgcgaacccagcgagcagcgaggccatgctggacgcgctcgatgcgcacggaggcgtgcccgcagtgcgcctgcaccacgagatctacctgggcgatccgcgccgcaccaagccggagaacctcaagacggtgatccgccatcccgtgaagcccgcgtccgcatgagcgacgcggcctctgccgccgcgccctgccccgtcgtccgcgcgcgctcgatcctccagaaagtgcgctacgacggcaacgaatggttcggcatcgactacaacatgaacctgtaccgcggctgctgccacggctgcatctactgcgacagcagaagcgaatgctaccgcatcgacgacttcgaccaggtgagcgtcaagttcgacgcattggccatcctgcagcgcgaactgcgcagccgccgcgtgcgaggcatcgtgggcgtcggcgccatgtccgacacgtacaacccgttcgagcgcactctgcgcgtgacgcgcggtgcgttggagctgatcgaggaattcggcttcggcgtgtcggtggacacgaagagcacgcttatcacgcgcgacatcgacgtgctgagcgccatcggagcggcgggcggggccatcgcgaagatcaccgtcaccacggccgacgaccagctggcgcgcatcatcgaaccgcacgcgccctcgcctagcgagcgcttcgccgcgctggccgagctggcggacgccggggtgttctgcggcgtgctattcacgccgacgctgccgtttgcgacggacgacgatgccacggtgcgcggcgtggtggaaggcgcggcagcggctggcgcgcggttcgtctaccatatgacgggcgtcaccatgcgcgaccgccagcgcgaccacttcctcgaccgcatcgcagccgtggatcccacgctgcccgagcgctatcgcgcggcattcggcgaccgatacttctgcaacagcccccgcgcaaccgagaaccgcgccctcttccgctcgctgtgcaagcagcacggtctgctttggcgcatgtccgacatcatcgccgcctacaagccctcccaacctatgggagcgcagacgagcctgttctaagcatgtaaatcgccgttcgcagccgagaacccgccaatcgcgggcatagtcgccgcgcgctcgttgaccctgtaatcgttacagcccccatgatggccgtacgtcaccgcgcgaatccgatccccattcccatcgaacgaagaggaggacgacaatgaaggtagcgaacaaagagatgagcgtacggaaactctggacctcgaacgaactgctcgacgcagtcagcgcccggaaggccgtttccatcgggaaactccgcggcgaggctctgcgcgcggcgctgagcgagatgcgcgaccccgagcttatggcctttctctcgaacgtcgacgtgagccgcgtagccaagatcgtagccgtatcttccatcgacgacatcgacctcctgcttgccatcgccgccggcaacggtcccagcttcgtcaggagaaacgcgctgcaccgcatcgacgagctatgcgatcgcacgcccctcgacgttcgcgacgcgcagcgcctcgtcgcctgtttgagcgagaagagcctcatcgccttcgcagtcgcgctcatggacatgagcgattacgattggccttcccactgcgacgtcacctcggtaggcgcgctgtgcgaggctctgtactcctgcacgagcatccacgagaccgtattgctcgaagacgcttgcgcccacctcgcgcatcgccgtcccgacctgctgtcgagcatcggcgcctgcgcccccgaccactacccgatggtggcctgatccttttcgatttctcgcgtccgcgcagaagggagtcctcaatgaaccgcaacacccgcaacgccttcatcaggcaaatgctccaaaacgaaacgtccatcgagccctcgcccgaattcagctacaacgccctcatcaaaagccggcaggactacgacgccatgtacagccgctccatcgccgatcctgaggctttttgggccgatatggccaccgagcaccttgactggttcaaaccgtgggacgccgtcgaggaatacgatttcgattcggatgagccgttcgtgcgctacttccgcggcggggagcttaacgcatcttgcaactgcatcgatcgccacctgaacgggccgcgcaggaacaaagccgcgctcatctggcagggcgagcccaccgaagaggtggacgtctacacttaccagcgtctgcatcgcgaggtgtgcaaggcggcgaacatgctccgccgcctcggcgtgcgaaagggcgatcgcgtggtgctgtacatgcccatggtcccccaactcgcgatcagcatgctggcgtgcgctcgcatcggcgctatccactgcgtggtgttcagcggcctgagcgccgaatcgctgaaggatcgcatcgtcgactcgggtgccacggtggtcatcacgtcaaactacggataccgttcgggcaagatcctgagactcaaggaaatctgcgataaagcccttgacatgtgcccccaggtcgagagctgcgtcgtcgtacgccgcatcgagaaacgcacggccatgaaggcggggcgcgatttctggtgggacgacgtgcttgctcccgaggcgccccaatgcgagccggagcggatggaagcgaacgatcccctgttcatcctctacacgagcggcagcacggcgaaaccgaagggcatcctgcatggcaccggcggctatctgctttacgccaccctcacctcgaagtacgtgttcgacctcaaagagcatgacattttctggtgcacggccgacgccggctggatcaccggtcattcctacctcgtgtacgggccgttgtcgaacggaacgacgtcgctcatgttcgaaggcgtgcccaacttccccaagcccgaccgtttctgggagatcgttgagaagttcggcgtcaacatcctgtacacggccccgaccgcagtgcgctccatgatgaaagacggcgaccgctgggtgaacgagcacgacatctcgaccttgcggctgctcggctcggtaggcgagcccatcacctcgaaggcttggatgtggtactactccaccgtcggtcacggcatgtgccccatcgtcgacacgtggtggcaaaccgagacgggcggcatcatgatcacctcgatacccggcgcagtggacatgaagccaggatcggcggcgctaccgttcttcggcatagaaccgagggtcatcggagcggacggagccgaggccgatgccggcgagcgcggcagtctcgtgctgacgaggccatggccgggcatgatgctgggcgtgtacggcaacgcgaaggctcacaaagacgtgtacttccccacccccggctactacctcacgggcgatggcgcctatcgagacgaggatggctacttctggatcacgggtcgcatcgacgacgtgatgaacgtgtcgggccaccgcatcggcacggccgaagttgaaagcgcgctcgtctcgtactcgcaggtcgcagaagcagccgtcgtagggtacccgcatccggtgaagggcgagggcatctatgcctacatcaccgtcaaagagggaacggtcatcgacgccgacctgcgcgaccgcctgttcgtgcacgtacgggagatcatcgggcccatcgccacgcccgatgtcatccatttcgccaacgcgctgccgaaaacgcgcagcggtaaaatcatgagacgcatcctgcggaaaatcgccgcgcaggagacggaggatctgtgcgacatctccacgctgtccgagccttccgtggtgcacgaactcatccaagagacgaagcgcatgagcgcctagaaggcccgctcgcgcacgaaggaccgcccgcgatccgtcgaacggatcgcgggcggtttcgcgtcgggcggcttacatatcgacaagcaccgagatatgcaacaggtagtcgtccgcagagtcggacatgagatacgagttcatatcgaactcgtacaccggccccacgagatcgagaccctcttctttgacgtagtccagcagcttggcataggatcgcgcaaccgtgctcgtgccgcccctatgaagaatgaccgcgtaattgccccgcggtttgcacgccagacgaccctccagaagcgcggggtgggaagggggcgagatccaggtgatgagcttcgtgtagacgaagtcttcagggtgatcggaacaaggaaagtgcacgatacgacccaggggaaacttcgtcacgccggcagacgatttgcaaaactcggcatgctcgctcacggcctgggcgaacgcctgctgcgtgcgctcaggctttacgtcggtcgtgatgagccacgtttcgtcccagaacgacagtctcggtttatccttcgggaacagcaaagcgcgctgggtgatgtagcgcatcttctcgatcatcccgatgcgcgcgtccaacacatcgcgctgcttcttcatcttctcgatgcccgcctgcgtggcctcgaggaagaggtcggtggtacggttatcgagataggtcttcacctctttcatggacatgcccgtatcgaggaagaaccgaatggcgtccataaggtacagctgcttgagcgaatagtagcggtaaccgttcttgccgattaccttcggcttcaacaaaccgaccttgtcgtaatggatgagcagttccttgctgacgttgcacatccgagcaaactccccggtggagagaagcagtgtcgagggtggctgcatgtcatcctcctttttgccgcgccctcttggggcgtttgctttgagtataccgtgcatgaaagatatttcccctgatatatacgggtaaggacgcaaaacgaccgccagcgcgcgtcccttcgcatgacctctcgcgtcgcagcgcgggaagcggcacgccacgcagagcatcaagggagaatgaggattccaggcctctactttccgcgatgcttctgctttcgtttctgccgcctgagagcgaatcgacgctcggcttgcgcttggcgagcctcgcgggccaaggctctggattcgattttgcgcgcctcgtaactgacgctcatggcctgctgggctttcgtgccgacgccggctcgctccacgagcttgcgcgcctcgcgctgacgacgcttcgggttcgcatgggagagcacggcatccgccgtcgcagacggatcggccgccatgtcgaacgaaagcgtcgcccaccggcgcacgacgaactccaacagctcgacgtcggcaggctcgacggcgccgaacacgacgcggcacgcgccatagcggccctcgtccgcatgctcgaagataccgacccagaattggccgtcatgaagcacggtcagcgtgatcgaggtgatgacctgcatggttgaacctccttgtatgtggttgctgcgcgaaggacggacaaccaaggaggcaggttactgacgaagccgacgatgcgagcgagcgcggcggcggcttcgcgtccggactaccagccggaccgtgtttttaccttcgcacgggcatcataccaagagagcgcccgccggtgcaactggggagcgcgtccatgcaacacacgtcggacggccttgtgcgcgagcagcgctttcggcatactgacggcgttggccaaccatctgaccgccccaacgttaggcacatccatgaacgtcaccatcaccgagaacccccggctcgccgatatcgaggtcacgctggcgtgcccgcgcatcgacgagcgtgtgcagcgcatcgtcgccgggctgaatgccttcgaccgcaagctcgccggcgagcgcgacggagctacctatcggctcgacatcgacgacgtctgctacgccgagacggtggacggccgcacgttcctgtacaccgaggacgccgtgtatcagacgccgcttcggctgtacgagctggaggacaagctggccggcaccgaattcgtacgcgcatcgaagcagctgctggcgaacttcgaccacgtggtcgccatccgccccgccctcaacgcgcggctgcagctgctgctggacaacggcgaatcggtgatggtctcgcgccaatacgcgcccaccatcaagcgcaagctcgacctctaacgaaccccgcccacctctgcaaaggagcatcccatgaaaccgtttctcaagcaattcgttcttggcacctgcgtcatgttcaccatcttcatgacgctgagcctgccgacggcctactactacgccggcctctcgggcgcagacacgcaagggctcaccatcacgctcaccctgctcgtcgcctgcatcggcttctctttcttgcagggcttctggttcagcggcctcatcctcaaaaagctggcctatccgctgcgactcaccgggttcgccgtcaccagcgcgggcatgttgttcgcctgcggttggttcggcaattggttcccccatgaaatcgaggtggtcgcgtcgttcttcatcaccttcctcgccatcttcgcccttgccgccgtcgggtacggcatctacttcaaaaagacggccggcagctacgacgcggcgctcgcgcgctaccgcgagcagaaccgccggtagctctcgcggcacccagctggcaggtcacgcaaccggcacggcgaaatcctcggagctgaagttctggtagtagcggcctcgctcggccgtgaagcgcagcacgcagtagtcgggatcggtcacccccagcggatagtacgtttcgtcgccgtcgagccatatcagctccttggcccacgcgtcttcgagcacttccatcgtgcccttgagcatgacgccgcggaagaaccgccggtcgacgaagtagatgcacgcctgcggatgagcgcggtaatgcgcggcccgcatggacggggtgttcgacgtgaagtagaacgtgcggatgccctcgcgcttgcgcggcggcagcatggccttgatctcggggtagccgtcctcgtccaccgagccgacgaaggaggtgttctgacggtcgatgaggttgccgatggtctgttcggggtctcgcatcatgagcgcgctccttttggcgcggcgcgcaagagcatgagcgcctcggcgtcgcgcaatatgccctcgctggttatttcgatcatgagccagcggcccatgctgctgtcggccgagcgctcgtacagggcgcgcacgtacgggtcggccgtcgcgagcagcgcctcggcctcatccttctccctcgagcccaccgacaccatgcagatgaagaagccgtcgcgcggatataccgtgcacagcgcgcggccgcgcgccttgtacttcacgttccaacccggagcgccgccgcatcggctgtactcgatgcgcggtttcgcgccgtagctttcgtcgacgaacgcggtgaacgcgtcccacaggggatggtcgatatagccggcgatgtcttccatcgtcggctcgcgatcgaggggaaacagctcgtgccaagccgccatgggcatcctcctagcttcaggggcgaatagacgcagtatatcacactgcagaatgctttgatcgggaatttaagaacttatgttctctatttttagagagagcggccaaagaggggcgggcgaccggcgcagcatggaaggcatcggtccccggacgcatgccgcgccatcgtgagcggcaccgtccaccggcgaattgcgcacgcgagaatcggcgcacgcgcctttggcgagcgacgtggtttcccttcaccgacgattcctggaatcggacgtgcggctcacgtaggatgaccagcatctcataacgcaacgagttgagcgcttcgccttgcccgcaaacggccaggtgaggctcagtcctatccgcgcaccggccaaccgcgccagccaacgcccttcgaggggagtgaacgcccatgaacgccaccgccctattgtcgcgattccgacgcacgcgaggcgccgtcgtgccccatcgcaaggacacggcggaactggaaaccatcgacatgcccgtcccaagcgaaatcgtgctgcccatgcagcagcatatcggagcgctgtgcgaacccgtcgtgaagaaaggggaccacgtggacgtgggcagcctcgtcgggcacgcgccgcggggtctgtccgccgacatcttcagcggcgtgtcgggcaccgtgaaggccatacagcccgtcttctattcgaccggcaaaaccgacacgacggtgatcatcgaatccgacggcgcccagaccgtcgcggacacggtggcaccccccgaggtgaccgaccaggcgtcgttcctcgcggcaataaagaaaagcggtctggtgggcctgggcggcgcgggcttccccaccgatatcaagctggcgccgcccaacctcgaggagatcgacctctacgtggtgaacgccacggaatgcgagccgtacctgtccaccgactaccgcgagatgatggagagccccgacgacgtgctgttcggcattcgcgagacatgcaggcacctcggcattccgaacgcgatgatctgcatcgagagcaacaagcccaaggccatcgagctcatgcgcgagctcacgaaggacgattcgtccatccaggtgaaggcgctgcccagccgctacccgcagggagccgagaacgtgctcgtgcacaatgccacgggacgcgtcgtcccgcgcggaaagcgccagaccgacgtgggcgtcatgttgaacaacgtgaccaccatggcctccatcggacgcttcctgaaaacagggatgcccctcgtcaaaagacgcttcaccgtttcaggcgacgccatcgctcgcccttgcaacgcgaacatcatcatcggcacgcgcctgcgcgacgtcatggaattcgccgggctgacgaaggagccgcacaaggtggtgctgggaggacccatgatgggcaacgcccagatcgatatggactacccggtcatccgccagaacaacggcgtgctcgtgttcagcaaagacgccatggaacagcccgccaccaccgcatgcatccgctgcggtcgctgcacgaactcgtgtcccatgcagctgtcgcccatcgccatcaagaaggcgtacacggtccaggacgcgaagaagctcgacgacctcatggcagatctgtgcatgggctgcggcacctgctcgttcgtctgtccagccaaacagccgctcgcccagacaagcaaacttgcgcgcgacttcatgcgcgccgagatggcaaggaggggctagatggaacatacgacgaaacgaccgcttgtcctctcgacgccgccgcacgtgttcgacggcatcaccacgcagaaggtcatgctgaacgtggtgatagcgctcgtgcccacgctgatcgcctcgttcgtgatattcggctggcgggcgctgctggttaccgccgtgaccacggcggcctgcgtgctgttcgagtacctatggtgcctgctgcgcaagaccccccagacggcaggcgacctgtccgccgtggtcacgggcttgctgctggccttcaacctaccctccaccatcccgctgtacatggcggtgatcggctcgttcgtggccatcgtcgtggtgaaggaactgttcggcggcatcgggcgcaacttcgcgaacccggccatcgtggcccgcatcgtgctgtcggtgtcgttcaccgcggccatgacgaactacgccgcgccccagggtttcctccccggcgcaaccggcgtcgatgccgtgagctccgccacgccgctggccccgggcgccgcgcagctgccgttcatggacctcctgttcggcgtgcaccccggcgtgctgggcgagacgtgcggcatcgccatcctgctgggcttcgcctggcttctggtcacgcgcaccgtcacgttcaccatcccgggcgtgtacgtgggcaccgtcatcgtgtgcagcctgctcaccggccacgacgtggccacccaggtgttctcaggcggactgctgctgtgcgccgtattcatggcgaccgactacacgacctcgcccaccacgttcaaaggccaggtgatcttcgccgtgggccttgggcttatcacgtgcctcatccgcttctgggggaacatgaacgagggcgcggcgtactccatcctgctcatgaacctcgtggtgccgtacatcgactcgctcacggcaaccacgccgttgggcggcgagaagaagcgccgctttgcccgcgcgaagaaagaaggaggcgaatgatggcgaacgcacccgacactcccgccgcgcccgctccaaccctctggaacagcctggtgaagccagccgtcgtcctcgtgctgatctgcgccatcgtaggattcctgctgggctcggtcgacaacctcacgttgcccaccatcacggcgaaccgcgaggcgcgcgcctgggcgacctacaacgcgctcatccccgaggcgaccgacttcgaggcgctgtcctgcgacgtgcccggcgtgaccgcgctcatggaagccgacgacgatttgggctacgccgtcatcgcgcagtcgaagggatactccagccaggttcccatggccgtggccttcgacgacgagggcaccatcacgaacgtcatcggcatggacaacaccgagacgcccggactgggcacgaaggtgcagctgcccgatttcaccgaccagttcctcggccgcgccgccgagcccctgaccatcgacgacatcgatgccgtcacgggcgccaccatctcgtccaaagcagccttggccgccgtgaacgaggccatcgaagcctatcgatccgctgccggcgaggcgcctgccgccgccgcaacctcggcggagaagggagcagcataatggcagccatcgaccaaaagccctcggcgctttccgtattcagcaagggcctgctcatcgagaaccccacgctgcgccagatgctgggcctgtgccccaccctcgccgtaaccacggccgtcacgaacggcatcggcatgggcgtggccaccacgttcgtgctcgtctgctccggcatcgtggtgtcgcttctgcgcaacatcattcccaccaccatgcgcctgcccgccttcatcacggtcatcgccgggttcgtgaccatcgtcatgatggtcgtcgaggcgtacctgcccgacctcaaccaggcgctgggaatctacctgccgcttatcgtggtgaactgcatcgtgctgggccgcgccgaggtgttcgcctcgaagcacccggtgaaggacgcggcgctcgacggcctcggcatgggcgcaggcttcaccctcacgctcgtcctcatgtcggccatccgcgagctcttgggcgcgggcaccctgctgggcttccctatcctcctcggcatcgtcgagcccatgaccgtgttcatcatgcccccgggcggcttcgccgtgctgggcgtgctgatcgccatctcggtggtcttcgagatgcgccgcaagcggcgcgcgggagagccggaagacgaggccatcgcatcgcaggaagacgtgtgcgcgtcgtgtcagatgtgcgacctgaaggagcgtgaggcataatggccgagtacgccgcaatccttttcagcatgatcctggtcaacaactacgtgctggtgaagttcctgggcatctgcccgttcctcggcgtgtcgaaaaagcttgactcggccgcgggcatgggctgcgcggtgaccgtggtcatggtgcttgccaccgccgtcacgtggcccttgcagcagctgctgaacgcgctggggctgggctaccttcaaactatcgcgttcatcctggtcatcgccgtgctcgtgcaaatgctggaaatcgtcatccgctactttcttcccgcgctgcacgaggcgctgggcgtgtacctgccgctgatcaccacgaactgcgcggtgctgggcgtgaccatcctcgccgtggacgaaggctacaactatccggaagcgctcgtggccgcgctgggcgccggtctgggcttcctgctggcgatggtgctgttcagcggcgtgcgccggcgcgtggacgaggccgagccgcccaaggcgttcaagggcatgcccatcacgttgatctccgcggccctggtgtccttgagcttcatgtgcttcgcgggcgtggccgacaacctgttcggcgtgctgtaggaagggggacgaatggacactgtcgtttggaccgttgcgctcatggccgccgtcggcctcgtagggtcggtgctgctgctgatcgtctcgcgcaagctggccatcggcgaggacgagcgcctcacctacctcatgagcatcctgccgggcgtcaactgcggtgcctgcggccaccccggttgcgagcagtacgcgaaggccatgatgaacggcgcgccgcccaacgcctgcaccaccggcggcaaccgcgtcgcgcaggcgctggccgcgtacctgggcgtggagtccacgggcgtggtgcagcgcgaagcgttcgtggcctgccaaggctcgctcgaccatatcgacccgcagctcgtgttcaagggcgttcccagctgccgcgtgttcagcacgctgtcgtacagcagcttgtcgtgcccgttcggctgcctcggctacggcgactgcgccgaagcgtgcccgttcgacgccatagtcgtggagaacggcgtggcgcgcatcgacacggcagcctgcaccggctgcggtacgtgcgcgaagatatgcccgcgcggcatcatctcgatggtcgaccaggcctcgtcgccaaccgcctccgtggtgacgtgcaagaacaccatggcaggcgccaaaacgcgcaaggtgtgcagcgtgggctgcatcggctgccagaagtgcgcgaaaacctgccccacccagtcgatcaccgtggagaacaacctcgcgcgcatcgacacggacacgtgcatcggctgcggaacgtgcatcgaagtgtgcccgacccatgccatcagcaaactggtgttccagtgatgccatggtgaagcgtttcgcgcgacagaaccgaaccacccgctcgtcccgtcgttcttggaccggacgagcgtttgctgcgctgctcgcgtgcgcgctgggcgccgcgctggccgtcggccccgtcggatgcgcgggcggcgagcccgacggggcggacgtcccgaccgcaacggccaccagctccttcacggctatggacaccggcatgaccctcaccgtgcacgccgtcagccaagccgtcgctgacgacgcggcaaacgcctgccggcagcgcgtcctcgaactggacgagctgctggcccccgagaacgcgaccagcgagatagcccggatcaacgccgcaagcggcgcgtcgacggccgtctcgccggcgacggccgcgctcgtcgccgcgtcgctcgacgcggcgcatcgcacgggcggcgccttcgaccccacggtgtacccgctgacgagcgcctggggcttcacgaccggcgaccatcgggtgccctcccccgacgaggtggccgcgctgctgccgtgcgtgggctacgccgccgtgcaggtggacgaagcggctggcaccgtcacgttggaagacggcgcgcagatcgacgtgggcggcgtggcgaagggcttcgcagccgacgagctgcgcgccctgctgcgcgagcgcgacataacctcggcgctgttcgacctcggcggcaacgtgacggccctcggctccaagcccgacggctcgccctggaaggtgggcgtcgccgacccggacgaccccgggaagctggcgggcctgctcgaggtgcgcgacgccacggtgtctacctcgggcgcctaccaacgatacttcgaaggcaaagacggaacgcgctaccaccacttgctcgacccctccaccggctatcctgccgcgtccgacctggcctccgcaagcatcgtcggcgcggacggcgcgcaatgcgacgcgctgtccaccgcctgcttcgtgctggggctcgacggcgccctcgacctgtggcgcgcggccgcggcggacggcgatgcggcgttcgacctcgtgctgatcgcctccgacggtcgcacgttcgtcaccgacggcatcgccgatgcgtacactccggccgccggaaccaacgcccaggtggtgcgctcatgaaacgccgcgcgagcaaagcggagctgctgttcgcagccgtcgtcgtggtcgcggccatgggcgggttcgccgtcgcgcacgccgcgggtgccgccaacccgagcggccatgccgtcgctaccatcgcccgcgacggcgtcgtgatcgagaccatcgacctcgatgccgtgaagaacccttacacgctgcgcctcgaagacgagcgcggcgtgaacgtggtggccgtggagccgggccgcatccgtgtggccgaagccgactgccccgacgaggtgtgcgtgcacacgggttggatcgacggtcctgccatgcccatagcctgcgtgccccacgggctgaccgtcaccgtcgcgcgggaaggagacgatggcgatggcctcgacgtcgtggcgcgctagcatcgccgccccttccaccctgcgcgtctgccgctgcgccctgatggccgcgctcgctttggcgctggctgcgctcgaatcgctcatccccgtcccgatgcccgtgccgggcatgaagctgggcatcgcgaacgtcgtgaccgcggcggccgcgttctggctgggccccgtcgatgtggccgtggttctgggcgtgcgcatcgtgctggcggccttcttgacaggccagctggcgacgctgccgttcagcatcgtgggcggcgcctgcgcgctggcggtgacgttggcgttcgtccgcttctcgtcgccgaatcgcgtgcgcctcgccgccatggcggcggcggtcgcgcacaacatcgggcagatcgccgtggccgtcgcggtcaccggcacgcccgagatcgcgttctacctccccgttctgctggtggcgggcatcgcggcggggttcgccaccggcaccgccgcgcaagcggtgctcgaccggattccgcacgcgcatgcgacggccgaccgcggaaagcgcgttcgtgcctgaccgcttcggccccttgtgcaccgcccaccgaaggaccgcgccatgcatgacggctcgtctaccgctaacctcgaaatcgccgagcaccgcgcaccggatgctatgattgccgctgtactaatgaatgagcatcggtaagatctgcatgaaaggacggctcatgggcatctacgtcatcaccggcgccaccagcggcatcggcgccaagacggccgaaatcctgcgcgaacgcggccatgaagtggtgaacatcgacctcagcggcggcgacatcaacgccaacctggccacgaaggaagggcgcgcaggggctatcgccgagctgcacgagcgcttccccgaaggcatcgacgccatgatctgcaacgcgggcgtgtcgggcggcaaggtgcccatctcgctgatcatctcgctcaactacttcggcgccaccgagatggcgcgcggcgtgttcgaccttttggagaagaagggcggcagctgcgtggtaacgtcgtccaactccatcgcccagggcgcggcgcgcatggacgtggccggcatgctgaacaaccacgccgacgaggatcgcatcctcgagctggtgaaggacgtcgacccggccatcggtcacgtatactacgcatccaccaagtacgccctggcgcgttgggttcgccgcatgagccccgactggggttcgcgcggcgtgcgcctgaacgccatcgctcccggcaacgtgcgcacggccatgacggccaacatgctgcccgagcagcgcgcggccatggaggccatccccgtgcccacccatttcggcgaggaaccgctcatggatcccgtcgagatcgcgaacgccatggcgttcatcgccagccccgaagccagcggtatcaacggcgtggtcctgttcgtggacggcggcaccgacgccctgctcaattccgagaaagtctactaggaggcgaccatggtcatcaacgatttcgtttccgcgatgcagagcaaagatcacgaggcgctggccgcctgcttcgccgaggagtgccggctgttcgactactgcccctccgtggtgaagcgccagaactcgtttctgttcggccgcaacgccatcgagatgtactaccacaacaagttcatgttcggaggcttcggcatgctggacccgcgcgtggtgaacgagcgcacggtgaacttctacgccgattacaacggcaccatcatccacgccctcgcccagatcgagaactgcaccgacggctcgtgcagcctcgacgacagcctgatcagggagctggtgatcaggccggcgtaagaggtcggcgatcgtttgctcgcgaacgcccggcaagccccgtgcctgccgggcgttcgcttttctcagggcctcatggggaaagggcgccaagggtgtgtcaaatcacccgtccccttgacacacgccccgtccctgggcgagccctacggattgcacacggaacaggcgccgtagccttgagcgatggcatcggaacgcgatatcgcgatctggctcttcttcaggtaccggcatccgtcacggtggtatttctcgcccgtgttcgtgatgtacacggtatctccgcctccgccgctcgccgcagcagccgcggctgctgcggccgctgcttcttgttcggcagcggcggccgctgctgcttcttgctcggctgccgctgccgcagcagcttcggcagccgccgcttcctcggccctctggcgctcggcctcctcctgcgcggctttctcctgagcagccttctcctcctgcgccttctgcatggcggcggcgtcttgcgacaccttgatgcgcaccgtgcggtccgcggatccgtcgaacgcgcattcgacgcgctcggctttgaacagcacgtcgcccgcttcgagcgaggacgcggacacctcgaacgtgtacgagcccgccggatacgccagcacgtacgtctttccgagggctgccctgtgcgaatcgctcacttttgtgccgtcggcctgcgtgccggtcaccagcaccgtcacggaagcggggacgtcctcctcgccggcggcctcgacgacgaagctcagctcgtgctcctcggccgcttccagaagcgcctcttgttgctgcgaagccggctggtcgggctgctgcacctgcgcatcgtcgccggaggccatgcccgccatgatcgtgatacccagcagcaacgagcacgccgccaacccgagcgtcgccttcggggcggcgaggaccggcgagccctccgtagccttcctgtcgcgcacgaacagcccgagcgacacggcgccgcacgccgcgcccacgagcgcgagcgatcccgtgaagcacagaaccaggccgatgatcgccagcacaagcggcaagcgcttgcgcggcggtgcggcgggctcgcccccggagggaaactcgacgatgcccccttcgaacgagccgggcttgtacggctccgcgccttctttgccggcggcatccgcatcgcgggccgacttcgcggatcccacctccttgacggcacgctccgcctcgcccggacgcgcctcttcgcgctcgggacgctcgatcggctcatcccccatggttcccatccttccctccaacgggcgcgtttcccccaagcggcaccgcaaaaggtcgcgcctccctcgaaaaagcgcgttatcctgcgaaaacgcgtgtcgcccatttatccgacgcttcattctagcaaaccggtagcatgagcatgatcttttcggtaagatatttcgaggaagggcccttttgctgaagggactgcatgccgttctgacggctatgcgccatgcccaagcgtccacctcgggcgaagctcggcgtgagctgcgcgcgaatcgcgctccgtcagcgaaatcgggaaaaacggccatgtccccgacttatgcgcacctccgccacgccgattcggcctttgcaggcccattcgcgacacgccgtgcaacataatcccaggccagaagttcaccatggttcacttcgcggccacaagccgtttcaaaagcgcacataagtcggggacatggtgctttcaggctgttttcgatggcacaagtgcgcataactcgggaacttccccacaccgagccgccccgacgatggcgcgaaaagggcgcccggagggggtgggcgcccttttctcgaaacccgcgcgatcgagtgccgaccggcgctcttgcgaaacggatcgttttacgaagcagaaccttccgccgcagcgttctgcccggcgatcctgccgatggtcacggcgctaagcacggtccaaccgctcgcgcagttccattcgcacacttcgcccgtggcgtacagaccgggtaccggctccaaggtcacgtctcccttgccggagcttgccagcttgagggcctcgccgttcgtgttgatcttgacgccgccgatggtcatcgacgtgctcacggtcaccggagccgcatagaacgggccgttcatgggaacgaggtgctcgccgcttcgaccgaaatcctcgtcgagacccgcctcgacgaacccgttgtagcgctccaccgtcgccttcaccttcgccggatcgaggcccacctgctcggcgacctcctcgacggtgtcgccgcaaggccacacgatttcgcgcacgctcagcagcttctccagctcgggcgtcgtgggaatcatgagaacaacttccttgccatcttgctcgttctgcttcgccagcacgtcgatcgcaagagccctgccgaaatactgacggccctcgttgcagaagcgctcgccgttctcgtcgagcagaagcccgttcaggcgctcggagtagtcgatgagcacgggcgacttcgtggccgcgccggccaccgggctcatcagcggttgccatgaggtgcgtgtggtgaacacgccggcgtcagacgccatcgtcaagccatcgccggtcagtcccgcggcacccgaagccttcaggttcttgttcgcagggcacagggcaaccagcatgtcggtgctgcccgaatagccgcccgtagccagcaccacgcccttctcggccttgatgcgaacaggctcgcggcccttcatagcctcgacgcccacaacgcggccgtcagcgtccttcacgagcttggtgacggcggttttcgtctcgatggagacgccggcgctttcggcagccgcggtcatggcactcaccatcgcgccgcccttgcccaccacctggtgaacaacaggcagatcggtgtagctcatgcgggggccgacctcttcctcgaacggaacgcccaactcttcgagccagtcgatggtctcgccgcacttgtcggcgttcaaacgggccacctcaggatcgagcgcgccgaaccactcggaatgcgccatgaaccagtcgtagatctcgtccggtgaaacatcgataccctgggccttcgccaaacgggtgccccatccggaaacgatgccgtcgcataccgcggaatcgccgccgagaccgttctccttctccagaaggacgaccttcgcgcccgccttggcagcttcgatggctgccgcatgcccgcctgcgcccgagccgaccaccaccacgtcgaacgtttccgtccaatcgccgtcagcagccgacgagccgcccgcactgcatcccgaaagcaccgatgcggcagcaatgcccatcgcgccggcgaaagcggcaccgacgaacccccggcgagagagatccccttctatacgctccatccctttgttcctttcaataatttgaaccgtcgagtcgaaacccgacatgcaatcaacggtgaaaccattgcaggaagctccccatccgacgcgtcttcgaatggctccgattcaatcggagcatcaccaatcatacaggccgtgcaataccctgcatatttcaagtatggtaatctgggtataaggcaatgccttatacaggggaagaaacggggaggcgccatgaacgatgtccagctgaggtcattcacagccgcagtggagctggggagcttcaacaaagcggcgaaaggccagttcctttccgtgccctcgttcgcccaaaggatcaactcgctcgaagctgagctcggctaccgcatccttgagcgaggcccgagcggcgtgcgccccaccgatgccgggcttgttctctatcgggctgcgaaagaggctctcgacatcctggacaaggcgaaagaagaagggcgatccgtcgcggaggagcaaccgagcgagcgcgtgacgatcggagtctggtggcaggtccaccccttcatgatggaagcggtccggcagatggcgcaaacccatccccacctcaaggtcgacttcgtggaaacctcgtacggcaacgcggcagaagggttcgcgcaggggctgtttgatcttttcttctctgcagactcgcttgcgctgcggcagatgggagcctcgttcacgccgctgtcgcgcgagaagtactactgcgtgttctcccccgacagccctttggcgaagcgcgagacgatatccaccgacctgctcgaaaacatcacggtgtacgcaggagcggactatcgcgacgttcccgagctgcacgagttcgaatcctttttcgcgcgagacaacgtggtgaaggaatccattttcagggagaagctcaccatggactgccttcgaggcgacgccgtgtcgttcttcaaccattccaacatctcgaaaatatgcccgccgctggaagcgcgccccatggagtggccgcccctcgcctacggagcccacgtccgtcccggtgcgccgcgcgtcgtgcgcgacgtgctggatgcctgcatcgacagcttcaagcgaaccggctgagccggtgtcgccggggcacccgatacgccggctactgcagttctacggtcacgcggaggacgtctccctcgagagaggcggcggcggtggctcccatggaggcggccagctgggagacgatggccaagcccaagcctgcccccgcgctcgatcgagcgccgcctccttggtagaagcgctcgaacaggcggtcgatgtcgatcgccgccggatcggccacgaggttcgcgaacgtcacgcacccgccgcgctgctcgatgacgggcgccgccgcgccgtggcgcagcgcgttcgccgtcaagttgcggaagatgcgcgcgagcgcctcggcatcggcctgcacgaccgcctcgtcgtccagcagcacgcgcggctcccagccccgctcgcagaactgcgggtacagcccggccagcacgtctcccagcacgtcagccggacgcaccggctcgcacgccacctcgaacgacggatcctgcacctgcgcgaacgagaacagatcgtccagcagctcccgcacgtcgtccaaccgatggccggcggagcccaagtagcgctccttcgccgccagatcagcctcaccttccgccagctgtaggtagccctgtgccccggcgagcggcgtgcggatgtcgtgcgacaggcacgtgagccctgcccggaacgcctggcgcgcctgctgagaggcgatgcgctcgtcttgcagctcgtccaactccgcattcacgccgcgcgcgacgcccagcacgccgcgcgtgcgcacgaacgccgccatgcgggcattgccggcaggttcgcgctggtcgaggaatcgcgccatgcgccgcagctcccgctcgtatcggaaggagacgagcgccgcccccgcggcgaacgccgcaaccgcgataccgaccaacgcgaatccgttcatgttcctacacgtcctttcgggtgcacacgcccagcgcaaccgccacgcatgccaccagcaccgcaccgcacgagatgaggatatggcctatgtcgccggacgatgccagcagcgcttcgccgccctgttgcagcagcgcgtagcttgaaaacggcagccattccgccacgcgggcaaacggctcccacaaagacgacaggctcccgaagatcatcgcgagcacctgcccgaccacgcccgaccccaccacgagcgccgtggcgatggcggccgtcttgttctgcgtcagccaggcaaccaccgccgtgacggctccgtacgcggacaagaccaccaccgccgaaccgaaccatgcggccacttcgccgaacgtgcccacatgcccgtacgagaaccccgccgccatgcgcgccagctcgaacgtcgcgataccgaacgcgaacagcgcagccgacagcagcaccacgaacacgagcttctcgccgtagtacgccagacggtcacgtcgcgccgacggcaggttcttcacatagccggtcgtgaagtcgagcgcgaagaacagcgcgaccatcatggccacgaacaccgccatcgcaccgccgcccagccacatggtggactggttctgcgtgaagtcggcaatcacggaatcgctcaatccttgaatgtcctggatgtcgactggttcgctgctgccgtccgatatgccgatatggatgctggccgaccccgtgacggactgggcgaattcgggcgtggtggtaagccacatcatgaacgccatcatcaccgacatcgccaggacgatgcccatcatcacccacagcatcttgcctttcaccaggcggtacagatccatcctcaaatacctaagcatgggagcctcccatcagctcgaggaagaagtcttcgagatcgcgcgcatgggcccgcagctcgtacacggcgatgccctgcgcggcgagcagcgttcccacgccggctgcatcgagcgcgccctgatcgcccgaggcgtcttgcaggcgcagcgagccgtccggcagcgccgtgcagacgatgctcggacgcgtctcggccagcagcgccaccgtgcgctccggctcggccgtgcgcacgacgaggtaatcgccgcacgcctgggtcacttcgtccgccgtcatctcgcccaccatgcggccctcgttgatcacgccgtagcgcgtggccatgcgtcccaactggtccagcacatgcgagctcaccaccacggtgatgccgcgctgctcgttcaagcggatgatgaggttgcgcatctcgcgcacgccctcgggatccagcccgttcatcggctcgtccagcagcagcacgtcgggcgagcccagcatcgccagcgccaagcccaagcgctgcttcatgcccagagaatagcttttcgccggcttcttgcccgcggcggtcaaaccgacgatgcacagcagctgctcgatttccgcgacgctgtcgaccaggcccagcgccatcgccttgcagcgcatgttctcgagcgcggtcatgttgggatacagccccgggttctccaccagcgtgccgatgcgcacggcctcgctgcgaggcgccttctgcgaagcgcttcccgaggaaccggctgcgaagcggtcgaacagacgcacctcgcccgccgtgggacggatcatcccgcagatcatcttcatcgtggtcgattttcctgcgccgtttcggccgacgaagccgtagatatcgccgcgagcgacgtgcatgtccagcccgtcgacgacgttgcgcccgcgatacgccttgctcaggccacgcgtttcgattgccagcacgtgaatctccttcctgacggcttgctgctgcggcggcctagctccttgaaaccctcgaggcctagcaactcgtcgcagcaatcccgcctactcctgccgtgaacgctctgccatccacgatacggagaaggcgttagggaaccctcccgaaaacgttaagaaagttgtaagaacgcgcgcgacggcaagcgaactgctcattcggccagcttgaagccgatgccccataccgtttctatctcgccggccgaatgcgcggcgcgcagcttgctgcggatgttgctgacgtgcacgttgatggccttctcctcgaccgcgctttcctcgttccatgcgatctcgaacagttcgcgcttcgtgaacaccttgcgcggacgtcgcacgagagcttcgaggatgttgaactcaaggcgcgtgaggcgcacgggctcttcccgcaccaaaagcgtgcgggcgtcgacgtcgagcgtccagtctttgtagcgcatcgcggttgcggcggcgggttcggggaggcgctcgtcggaaggcgcgccggacgcggatgcgcggcgaacgtcggcgtggcgcagctgcacctgcacgcgagccagcagctcgtcgaggtcgaagggcttggtcaggtaatcgtcggcgcccagcttcagcagcgccaccttgtcggcggcggtcgtgcgcgccgacatcacgatgacgggcatgtcgccgcaggcgcgcacgaggcgcaccacgtcctcgcccgccatgcccggcagcatgagatcggtgatcacgaggtcgaacggctcggagccggaaagcagcagccgcccctcgctgcccgagaaggcctgcgtgcaagcgaacccgttgcggcgcaaatgcaccgccaccacctcgttgatgtcggcgtcgtcctcgatgatcactatggatgctggctcgctcatagagggtattgtaccgcaaggcaaacgcgggaacccgcatttcgagagccgcaaccgcatgcaccctcttttcgctccaagcccaaacggcaaaaccggcggtgaaaggccgcgtcccgaatcgtggtgtatcagggccatcgccggagaatcgccggcacccttgcgaggtgaatcttagccttcgtcctccttcgggtcaatggcgctccctatgatcttgcgcgccgcctcgcgggcggcgagcacctcggcctcgccgggggcctcgcgctcctgggccttccaggcgtgcgcgagcgagggcctggagatgacgcagcgcgccgaccactcctcgtcggcctcgatgagcgccgctcccaccaggcggatgagcgactcgcgcgaggggaacccctgcacgacgcgcgtcctgcgcttgatctcgcggttggccctctcctggacgttgttggtgcggatcttggtgcggtgcgtggccgggaacgccaggtaggcgagcgccgcctcctcggcctccaagagcacgtttccggccgccctcgagatcttcagcacctcctcggtcgcctcttggtagcacgcccgcacgaggacggggctcttctgcgcgaagacggccttcatggcctcgcgcgcctttctctggtcgtccttcctgtggatgcggcccgccacgttgcgcatgaggtgcgtgacgcagcgctgccaggccgctccttggaacgtctcggctatcgccttcgcgagcccttcgtgggcgtccgagacgacgaggcgcacgccgtcgacgccgcgcgccctcaggccggagaggaacgccttccacccggcgtggctctccgtgtccacgcagtccacgccgacgaagcgcttgtggcccgtgtcgtcgagcccgatcgcggtcacgacggcctgggacgccgagcgcccctccacgcggcacttcacgtaggtggcgtcgagccacaggtaggcgaagcgcaccccgtcgaagcgctgcctcctgaacgcgtccacctcggcgtccaggcactcgcacaggcgcgacacctgcgacttcgacatcgacctcacgccgagctcgcccgcgacggcctccaccttgcgcgtcgatatccccatgacgtacatctcggccaccgccgcgacgagcgcccggtccaccctgcagtagcgctcgatcaggtcctcggggaagaacgagcctcggcgcagcttcggaatcttgagggtgacgtcgcccgcggcggtcgagagcccccgctcccggtagccgttgcgcgagttgacgcgcccctcgtcgcgctccccgtagggggcgttgcacgcctcgtcggccttcgccgacatcgcggcgttcgccaggagctcgagcatcctgcgcccgaaggcctgcaggtcggtgcattcctcgaggatcgcgaacgcgagccccttcacttcggggtcgttgaatagtagagtgtccatagcgggcatcgccttccttcgaatctgtcttttgtggtgattgacgattctagacgatgtccgtttttctcgggcaggcttcgcccgccctccagaaacggattgatacaccaactttcgggacgctacccggtgaaacgcgctctgccatgaaaaaggccgaaaacggcaatgtcccctacttatgcgcacttccgccaagcaagtcttagacttctgcgcgtctcatcgtgaacgtgatcagggaaatacctggtcacagaatcttttgaattgcgagagccgcaaaaaagagaaggttggagcctttcgtagcgcacataagtcacggacattgcctttttcggcctttttcatggcagagcagcgcataagtcgggaacttttccatcgtggacgttgtggcggtgttgacggaaagcagaaacccccaaacatactggtgcgttctcaagaaaaggcttctcgacgaggggaaccaaaccgttgcacattgtaacggtttgaaaatgaagtccgcagacggcaagatgcgccttaccgacgccggcaccaccgagcagatcctgcgcctcgtccagtccatcccctcgcccaaggtcgagccgttcaagctgcggctcgcacaggtcggcaaagagcgcatcgacgaaatgttcgaccccgagctcgccatcgaggaagagggggggtgcgctaaacgccgacgcggccgaataggcgcgcacccgatcgcaacgacggaatgcaaccggccgtcggcctagctgtcggccggttgcagatgcacgtaaatactttctttttgataggtttacgtttaccataggctcatgaagcaaaacgacgccctcaacatactccgatcctgggacatccaaggtcgctacgtgttccgcaagcacgacctcgccatcgtgctggacgaatcgggccgcacgctcgatcagacgcttgcacgcctcaagaaggccggggtgctcgagcggcccgcacacggcgtgtatgcgttcgctcacagcaggcacctcggccccaccacgatcgagcacatcgcccgcaacctcaggcgcggcgagctcacctacgaaagcctcgaaagcgcgctgtcgaggcacggcgtcatctcgcagatacccatcaaccgattgaccctcatgaccacgggacgaagcggggaataccgcacgccctacggcgtcatcgaattcacccacacgaagcagcccgtcgcgaacatcctgccggagctcatcgaacgggaaagccacgcgctgcccctggcctccaagcagctcgcttacgcgaacctgcgctcagtccgccgcaacctcgacctcgtcgacgaaggagaactgcatgcccaagcttgacttcaacgcttacgccaattcctcccgatcgaccaatacgagcgcacggtagcgcgcccctcgttccgcgccgccctgaccgagaacgtgcaggagctctacaagcgctgcggtacgcggggatagagcgagatcccggatgtttcacgtgaaacatcgggcgttctagcacaaatgtttcacgtgaaacatccaggcgagtaagaaagcgggacggcgggcttcgggcgcgccgccgcggggcggcgggacgcagcggggcggcgagccacggcgggtcggcgaggacgccgcgggtcgacagggacgcgatgggtcggcgggcttcgggcgcgccgccgcagggcgcgaggcgatcgcgcaaaaagaaagggcccgcggccggacatgcggcagcgggcccttcgggcaacggatccgctttacgccgtgatcacggtgccggtcttgccttcgaggccggcggcggcgcactcgaggctggtgatgagggccttgccctccgggaacgcgcggacgtactcgatgcaggcctcgaccttggggagcatggagccgggggcgaactggccctgggcgatgtactcttcggcctcggcgaccgtcatcgtggagatctcctcctgctccggcttgccgaagttgatgcagaccttctcgacggccgtgaggatgaccagcatgtcggcgccgaagtcggcggccagcttggccgaggagcggtccttgtcgatgaccgcgggcacgcccgcgtactggccgccctcctcgaacaccggcacgccgccgcctccggtggacaccacgatgtagccgttgtccatgaggtccttgaccgcgtcgaactcgacgatgcgcaccggcttcggtgaggcgacgacctggcgccagccgcggcccgcgtcctccttgaaggtccagccggtctcggcggccttggccttggcctcctcctcggagaggaaggcgccgacgggcttggtggggttctggaacgccgggtcggccgggtccaccacggtctgcgtcacgacgcaggccgtcgagcggtcgatgccgcgcagcttcatgtcgttcaggatggcctgggacaactggtagccgatgtagccctggctcatggcgccggcctctgggaacggcatctccggggtcttgccgtcgttgtcggacgcgtacgcgaacgcgttgttgatcatgccgacttgggggccgttgccgtgtgacacgatgacgttggtgccctcctcgaccatgtcgacgatgttcttggcggtgtccttcaccagctggagctgctcctggggcgtgttgcccagggcgttgccgcccagcgcgatgacgacggacttaccttcacccttctgataaggcatgcgatgctctcttctctcgggcgcgcccaacgcgcgccgcagggacgggaggtgaggaaaaagcggagcggcccctggcgaaaggaccgctccgtggcccgccgccctccgccggtgcgcaccggttgtccggaggacggatggggccttctggaaaatgccttgacgaaaaagccggggttgccacggccggagactgtcaggcagaggataatcaatcgcagaacgctcgcggcgccggcgggacgatccgccccgccggccgcgagtccgccggaacagcctacttgccggccggctcctgctgggtgatgcagtggatgttgccgccgccgaagaccacctggtcggtcttcacgcccacggccttgtacgcgccctcgccccacgcctcgtcgaacgcagcctggatctgctggacggccagcgcgtcgttctcgtcgccgtactgcggcacgatgacgccgccgttgacgatgaggaagttcatgtacgacgcgatcagcggctcgtcggccacgcgcggctcggcgtactcctcggtgtcgatggagtcgcaggacgcctggtccatgtacagcggcttcacgggcatgcagagcttggtcacctcgagcttgcggcccttggcgtccacggcgttggacagcgtctcgtaagcggcatggcactcgttgtagaacgggtagtccgggtcgtcggaccagatgcacagcaccttgccgggagcgacgatctgggcgacgtcgtcgatgtggccgttcgtctcctcggggtcgatgccgtccttgacccagatgaccttctccacgcccaggtacttcttcagctgctcgtcgcagtatgcgcgcagctcttcggaccagggctcgtaatcggtgacggacgcgttgcggccgggatcgagcaggcacatgtcggtggtgatgaccgtgccctcgccgtccacgtggatggagccgccctcgaggatgaagctctcgggacggtagcgacggcagccgctcatctcggccatcttgagggcgatctgctcgtctttgtcccacgggaagtacaggccgttctcgaagccgccgtaggcgttgaagtgccaatgcacggcgcgcttgtcgccctcgtcgttgaccacccaggtggcgccggtgtcgcgcacccacgcgtcgtcggtggtcatctcgacgacggtgacgttctcgtcgtcctcgaacacggccttggcgttggcgtagtccacctggttcacgcacatggtgacgggctcgaactcggcgatagcgcgcgccacgtcggcgtactgcttctgagccggcttcgcgccccaggcccacgtgtcggtgcggtgcggccacgccatccagatgcgggtctgcggctcgaactcgccgggcatgcggtagccgtcggccttcggggtggaaacgctctcgtgaatcgtcttcataatgcacacctttctgttttggtttgcagtacttgcttcaagcgttgctctgctgctctgctggcgccgcgccggatccttccctaaaggactagcttcgcgtcgcgactccggcgctgcgcgcctccgctcaggatgacagccgggatgacgacctgcgcggcgccagcttggttcttgcttacgcgaccggcaccgcttcgggttccgcgtcgcccttcgcctcgggggcctcggcctcgtcggcggcctcttcggcggcttcctcagccaagcgctcggcggccaaggcgggcgtcaggcccttgtactcttccgtgcggccgcgcttcgaccagatgcgcaccacttcgcccagcaccacgaacacgatgacgccgatgagcatggggatcttcgaaagctcctcctccgtgccgttcagcggcacgatggtggcgatgatggccagcaccagctcgatggcgggaatggccagcatcacgtacatgagcttgcccttgaaggggaacgtgaacacgcgcttacggttcggatccaccttgcgcatcttcaaaaacgccgggaacatcggaatgtagctgatcagcaggaacacgacgttcatcgagaacagcatccagaagatgccctcggagatggccggaatcgggatcagctgcagcatgagggccagcgaagccaccacgccgttcacgatagccgcgccggtgggcatctcggtcttcgcgttctcatgcgagaacaccttcggcatgttgccgtgcttggcggcgtagtcggccacgaagttcacgccgaacgaccaggaggccatgttcgcgaacagggtgaccaggaagatgatgcagatgagcatgaagatgggagacgcctcgcccaccatggtcatcacggcgtagatcatgccgaagtccgggtcgatctggtcggccgggatggccgcgccgatgccgaacgagcagaacaggtagatggcgccgatggccaggccgcccagcacgatggccttggggatgtccttcgaggggttcttcatggcgccggcgaaggtgcagatgacctcgaagcccatgaagttgaacaggatgatggacaagtacgtcagcgcgttggtgttggtgaggtcgggcatgaacgtggccggcgacatgtcgctggcgaagccgttgttcacggcgtaccagatgccgaggccgcccacggacaccgcgatgagcaccttgaggacggcgcctccgttgaggatccaagcggagtccgacaccttcgagaagctcatgaacacgacgatccacacgaacgccagctcgatgagcagcacgggagccagctcgaactccacgccgaacaccatccccaggatgtcggggaacagcgtggccagagaggcgatccacagcgggaagttgatccagtagtaccacgccacgcggctgccccagcggtcgccgaacgcctcgcggatccagtcgtacaggccgccgtcggaatcgtaggtggttcccagctcggcgacgaccatgccgtaaggcagaaggaacgtgatgatgaggaagatccaccagaagaactgctggttgccgatagcggcggcgggtgcggcggcctcggccacgaacaccacgcagatgacggacagaataacgctgatgaatgagaacttcttgactttattacccattggttgtcccctttcaggggttcagccccaccgggccgcgtcagctaacgtcgcgggcccggcccggtggagcgttcgatcagtgcaggcatcctggagaaggccgtccccctccaggatgcgcaatccccaactaggcgatcttgttgagcaccgcgttcatgcgagcctcggcggcgtcggcgacggcggcgtcctccttcgtcttcgggcagaggtaggccaggatggcgcggatggagtgcttgcggttctcggcctcgacccagcagaggctccgctcgggatggtccatgacctcgtcggtcacttcctcgccgcgggtggccggcaggcagtgcatgaacttggagttcgggccggcgaagtccatcatctccatggtcacctggtacttggggtagaagatgtccatgtagctctcgccgccctcttcctcgtcgtacaggccgtaccacacgtcggtgtagacgaagtcggcgcccttgatgcactcgatgtcgtcggacacggtgat

SEQ ID NO: 47 - DNA, 89235 bp, Eggerthella lenta
  source 1..89235: mol_type = genomic DNA
ttccaacgcgcttccaacgcggattccatatttcttgccagtgtttccaacacggtttgagcgtacgcctggcgtgggtcttgcgtcgatctagcgccggcacgaaaaagacggcctctcgaaactttacagacttttgaccggcatccgacacggttctgatgctccgtcttcatcatgttccttgcagcgggcctccgatgcccgcgcttcagcggaaagcaatgcgctcgcaaagcgcatcgaaggaaggaagaagatgaagaagcgtttggcaatggcggtgagcgcggcggttctggcgctgggactgttcgggctgttcggttgtgcgtcgggcaacggcgatggtgcgagcggcgcaaccgacggaggagcgtcggcttcgaccagcccgtccggcgaggtctcggtctattcgcgcgaggacggctccggcacgcggggtgcgttcatcgagctgttcggcatcgaggaaaaggataccaacggagacaaggttgatctgaccactcccacggccgccatcacgaacgccacgtccgtcatgatgacgtccgtggcgggcgacgcgaacgccatcggctacatatcgctcggttcgctgaacaacacggtgaaggcgctcagcatcgacggcgccgaagctacggccgagaacgtgaagagcggcacgtacaaggtggcccgtccgttcaatatcgtgacgaaggacggcgtgtccgatgtggcccaggacttcatcgactacatcatgagttccgacggtcagaaggtggtcgaggagaacggttgcatctccgttgccgacaacgcgggctcctataaggcttccggcaagtccggcaagatcgtcatcgccggttcctcgtccgtgaccccggtcatggagaagctggccgaggcgtacaaggctctcaatcccgacgtcgccatcgaggtcaaccagtccgactccaccaccggcgtgaacatggccaccgagggaacctgcgacatcggcatggtctcccgcgagctcaaggactccgagagcggcgtgaaggccacggtcatcgcccaggacggcatcgcggttatcgtgaacccggatgcctccatcgacgagcttacgtccgaccaggtgaagggcatctacaccggcgagctgaccacgtgggaagatgttattccgtcggcttaacagccgccggaagagctcgacgctgcgaggcgccgatgcaccccgcctcggcgcctctcgctgacatagccagaccaaggagtgtacatgttccacctgcacatcaaagagggcatagcgaaggcgctgttcgtggccgccgcggggatatcggtcctcgcggtggctctcatctgcgtctttctcttcgcgaacggcgtgccggccatcgcgcagatcggccttcccgagtttcttttcggcactacgtggcgtcccgccaacgatatctacggcatcttcccgatgatcgtgggcagcatctacgtgaccgccggcgccatcctggtcggcgttcctacggggcttttgtgcgccatcttcctgtcgcggttcgccagcggcaagatcgcggcgttcctcaagccgggcgtagagctcttggcgggcatcccgtcggttgtctacggcttcttcggcctggtgatgatcgtgccgtttattcgcgacaatatgccgggccgcggcctgtcgcttctggccgctgccgtactgctgggcatcatgatcctgcccaccatcatcaccgttgcgcagagcgcgctcgatgctgtgcccaagaagtactacgagggtgcgctggcgctgggtgccgatcacgagcgctcggtgttccgcgttatcgttcccgccgccgtctccggcatcatggccggcatcgtgctgggcgtgggccgcgccatcggcgagaccatggccgtcatcatggtggccggcaaccagcccatcgttcccgagagcatcttcgagggcgtgcgcaccatgaccgccaacatcgtgctggagatgggctacgcggccgacctgcaccgcggcgcgctcgtggccacgggcgtggtgctgttcgtgttcatcctgctcatcactatgttgttcaacgttatcaagaagcggggtgagacgaggtaatgagtcccaagctgacgatcgcctacgaatcggtcgacgcctccccggcgcccgccgccaacccgggcgatcggatcgatgcgatgttcgaagcggcggaagagcgtcatcgcgccgcacgccgcgtggtttccatgctgctgcgagcgctggtgtatctgggcgcgctgctgaccacggcggtgctgctgttcctggtgggctacatcctggtgaacggcgtgccgtacctcacgcccagcctgttcgagtgggagtacaactccacgaacgtctcactcatgccggcgctggtgaacacgctgctgatggcggccctctcgctgctcatggcggtgccggtgggcgtgggatcggccatctacctggtggaatacgcgccgcgcggcagtcgtttcgtagctgtcgtgcgtaccaccgccgagacgctgcagggcatcccgtccatcatctacggcctgttcggcatgttgttcttcgtgacggcgctgcattggaacctgtcgcttttggcgggtgcctgcacgctggccatcatggtgctgcccgtggtcatgcgcaccaccgaggaagcgctgctggccgttcccgacgcgtaccgcgaaggcgggttcggtttgggcgccggccgtttgcgcacggtgtttcgctgcgtgctgccttcggccgtgcccggtatcctgggcggcgtgatactggcgctcggccggtgcgtgggcgaggtggctgcgctcattttcacggccggctccatcgcccagatcccgaacttcgccggcgagggcgccatggcggtgttcgattccgcccgcacgctggccgtgcacatgtacgcgctggccagcgaaggcctgcacgtgaacgagacctatgccacggcggtggtgctgctggtcatggtggtgcttctgaacctcctggccacgttcgccgccaagaagatgaacaagggaggcacctatgactaacgtcacgcttgagagaaccgctccgacccagaacgccccggctacctacatgccccaggcgcagggtcaggcggccgaccgccgcatcaaggagaaggcgcccgtcgacgcgcccgccaagatgggcgtgcgcaacctcgatctgtactacaaggatttccacgcgctgaagggcatcgacctgcagttccccaagaaccaggtgacggcgctcatcggcccgtcgggctgcggcaagtccacgctgctgaaaagcctcaaccgcatgaacgacctggtggaaggctgccgtatcgaaggcgagatcacgttggacggcgaggacgcctaccgctccatcgacgtgaacaatctgcgccgtcgggtgggcatggtgttccagcagcccaatccgttccccatgagcgtgtacgacaacgtggccttcggcccgcgcacccacggcatcaagaagcgcgaggatctggacgccatcgtggagcagagcctgcgcgacgccgccatctgggacgagatgaaggaccgcctgaagaagaacgcgctcgggttctccggcggccagcagcagcgcctgtgcatcgcgcgcgcgttggcggtgcgccccgaagtgctgctgatggacgaggccaccagcgcgctcgaccccatctccaccgctaagatcgaagaccttgtgggcgagctcaagagcaagtacacggtgatcatggtgacgcacaacatgctgcaggcgctgcgcgtgtccgacaagaccgcgttcttcctgctgggcgagatggtggaggccggctccgccgacgacatcttcacgaacccggccgacccccgcaccgccgactacgtggcgggaaggttcggctaggtcggagcgttgtcatcctgagcgcagcgccgaagtcgcggcctgtcatcctgagcggaggcggctaagccgcgttccctcaggatgacaaaggggcttcctttcggctttacgcaaatttgacgttgccgcaagcccgtggtttttcctcctgctttacaataggttcgacggcggcgaaagcgcgctgccggccgaaaggaccaacccatgatctactacgttgaagacgataccaacatccgcgacctcacggtgtacgctctcaagcaggccggattcgaggcggcgggcttcccggcggcgggcgagttcttcgccgcgtgcaaggagcgcctccccgagttggtgctgctcgacatcatgctgccggaaatcgacgggctcgagatcctccatatgctgcgcgagaacccggcgaccaagcatctgcccgtgatgatgctcacggccaagggcaccgagttcgacacggtgagcggcctcgatgccggcgctgacgactatctggccaagcctttcggcatgatggagctggtcagccgcgtgaacgcgctcatgcgccgcgcgtcggcgcctcccgtcatggccgacgacgagctgtcttgcggtcctatcgagctatgcgtgtcggctcacaccgtgcaggtgggcggcgagcccatcacgctcacgctcaaggagttcgacctgctgcacacgctgctgcagaaccaggggcacgtgctgtcgcgcagccaactgctggaagacgtgtggggtatgacgtacgtgggggagacgcgcacggtggatgtgcacgtgcagacgctgcgccagaagctggccgcggcgcaagaaggggccgacgccctcgttcgtacggtgcgcggcgtgggctactgcatcaaaccctcctcgtgagcgcgcgcatgagcccgacgcatttcaaggttaagagcctgtccggcaagattttcacgagcgtgctcgcgttcacgttggccgtcatcgttgcgctgtccgtgacgatgaccaccatctactacctgtcttacgagcacgacgctgaaaccgagcttgcggccagtgcccaggatgcggcgcgctatctgaacgccactccgtcgtccgagaatgctcccgcgctgaaagagcagttcagtggactgacgcgctacacgctcatcgatgcggacggcacggtgctgttcgacagcgccgccgacaccgatgccatggacaaccacgccgaccgccccgaggtgcaggaagcggcagacatgggcgaggccgtcaccatgcgctactctgaaacgctgggcaccgacaccgtgtatgcggcggtgaagctggacgacggcagtatcgtgcgcctgtccgagacgcggcattcgctgctatcgtttctcagcgagatgctcatgcccgtgctcatagcgctcatcgtggcagtggcgctcgtgttcctgctgtcgaagatacttacgagccggatcatgaagcccatcgacgcgctcgatttcgcgaaccccttggacaatgagatatacgaggagatggacccgctgctcatccggatcgacgagcaacagcgccagctcaagcagcagaacagcgagctggccgaagccgagaacatgcgccgcgatttctccagcaacgtgagccatgagatgaagacgcccctgcaggtgatatcgggctacgccgagctcatgaagaacgacatggtgcagccctccgaccgccagaagttcgccgcgctcatctacgacgaggcgcagaccatgcgctcgctgatcaacgacgtgctgacgctgtcgaagcttgacgagtcggccttcgagaacgacggtgcgacggccattaacctgtacgcggtggcgcagcgcgtggccgggaggttgtccagcttcgcggacgaccagggcgtgcgcgtgcgggtggagggcgcgtcggcgtgcatcgcgggcagcgagacgttggccgaggagatgctgtacaacctcatcgagaacggcatccgctacaaccacgaaggcggcctcgtcaccatgaaggtgggctccgaatgcgtggaaggcgggctcgcgaacgccgcgtaccagacggtcgtgcgcgtcagcgacacgggaccgggcatcccggccgagttgcacgacaaggtgttcgaacgcttcttccgcgtggacaagagccgttcgaaggaaaccggaggaacgggactgggtctggccatcgtcaagcatgcggttatgtaccacggaggcgttatcgaggtggagagcgccgaagggcagggcaccacgttcgtgctgcgttttcccagcgcttgacctctcggctactatcgagcatgcacggctttttgcgccctctccggagggcgctgccgttcttctggagcttgcgatcgggcgcgcacgttactgagaatatcgctatactaggacgcaataccagtaaccgcgaagcgcaaacgccggcatgtccgttaccgtgaacgaaggctctccatggctgaatacaacgacgatctgaactatcccgatccgttctacatctcggacatcgagacgtacgagcttctgcacgtgaacgaggcgggccgccggcttttcaaggtgccgctcgatgccgatctggagggcgtcaagtgctacgaattcctgcaagggcgcgatgagccgtgtccgttctgcacgaatcatctgctcagcgtcgagaaaagctacgtgtgggaattcacgaaccctttgacgaaccatcgtcatctgctgaacgatcgtctgatcaactggggtgggaagctggttcgtcttgaggtgggcttcgacctcaccgatcaaaaagaagagggtatgcgctttcggaacctgcatcgcaacgaggaggtcatcctcgagatcgctaacgatctgtatcgcgagaccgatccggagcgcgcgtccgtgcgcatgctcgaacggttgggcgaggagcttggagccgagcgttcctatctgttctcggctcgcggagaagggttcagcaatacgcacgagtggtgtgctgacggcatatcctcccagatcgaaagccttcaggatatggactaccgtttgttcgagcggtggctcgacctgttcggtcggggggaatgcgtgctgatcgaggatctggacgccatcaagggcgttgtcgatcctcgggagtacgaaacgctgcacgtgcaggagatcgccagtctggtcgtcgcacccatcgaacgcgacgggcgtctcgtgggcttcctcggcatggacaaccctccggccgaccagatccgcgacatcgcgccgctgctgcgcacgttgtgctacttctacagcatgacgttgcagcgtatcgaaaacgagcgccagctggtggcgatgagctatcacgattctctgaccgggctgtacaatcgaaaccgctacaacgaggacgtgcggcgccttgagaagctggcgcgcccgttcggcgcggtttttctcgatgtcaacggcatgaaggagatcaacgatcgcggcggccatgctgaaggcgaccatctgttgcaagcatgcgctcagacgatgcagcgcgttctcggagaggttgcgcggctgtaccgtgtgggcggcgacgagttcgtggccacggtcgtggataccgacgaagcgggctttcggtcgcttgtggagcggctgcagaaagcgttcgacgaagttccgtcgtgcgaggtggctatcggcgcgcaatggacgccgcgatcgagtgagatcgatagaacgttgttcgatgcagacgaggcgatgtaccgcgataagcgccgtttctaccagaacaggagcacgtcggacgtagcgccttctcgacgtgctcgcggcgaccgcttcgacgagcgcgaaagggcgaaggcgcgagatgtcgcgcaggaaggcacgctcatggagctgctgggcatcaggtttgctcgtcataggttggatgaagctttcacaactctcgaatccaatgcttgctacagtttggtgacgggcgacgacgaggaggggcgtcgagccgtcggtgcgttggccaaggaggctcgcgaggcgggcgagcgaggcttcgccggaaccgtgtgtgtgaatcgcggcggcgctcccgcacgggtgcgagtttcaggcgctttcgcagaagacgaggccgcgggaggtgcggtggcgctcgcgtcctacgtcgatgtcgaagatgcgcttgcgtccatgggaaaggaagcctacaggccctcgaacagctgacccagcgtcacgcccaagccgagcgcgaccttctccatgaagtcgatggtggcgttgcggttgcccgcctccaccttggcgaggtacgaccgtcctacacccgtcatgagcgcaagctgctcctgcgtcagattgctctcctcgcgaagcgcccggacgcgctgtccgacgttttttctcgttgcgtgagtcataaacaaagagtacggtcttgtgcggtatactacgtgacctatagggcacaatctgcgaatgtgccgagtagatgcagggaggcatcgagggaggctcgcatgatccaagacgaagtgctgttcactttgcaattggctaccgtagtggtcgatctgcatcgccgtatcggcgattcgattgcagagctgtgcaaggtgtcttacctagagttctgcctactgtcttcggtgcgatcccatggtggtgcgatgctgcttgccgatttttcccgcaacgcgctagcaagtgagaacactgtcgtagtggctgcgaatgcgttgtcgcgggcggggctcgtgaacaaagggcgttgtgcgagcgacggtcggctgatcgttctcgaggagaatgtcgccggcgctcgtacgctcacgcgggggtacgaaggcatataccgaaatctgcgatcgtcggtgtgggcgaaccataccaacgaggacattgaagagatcatgagctccttcccgtcggtggctgaaaagcttggggtggacacggttgagatcaaccgctcatgccattcggttctcactccggcttatctcatgatcgtcgcggcgttgttgcggcgttgggcgcaggttgtcgtgcaatatgctggactgtcgttcgtcgagtatcgatgccttgccgttttggaaacgcggccttcgcctttgccttgctcggttatcgccgagattctcatgctcgagcgaaccacggtttctacgctggtggcgaagttagctcgcaaaggtctggtttcatacggcgtcggagttgatcgtcgccacaaggcgatcagtctcaccgagaaaggcgaggtgagcgccgcgttggtcacgggcaagctgggtcgcgtcacggccgagctgtatgccggcgtggatgcttcgctcaaatccaaaacgaacgaattgcatatgcgcatgtacgcaacgtactcccgcgcatagtatcggttttatttagcctgatcaaactattgtcgcctatccttcttacgctgaatcgcatgatgcgtcgcatcatgcgaaaaacgttgtatcagaatggatacacctcgtagactggcagtatggaagccatggggaaacggggaagctatgaagcgaaacgaaagaagggtgccttactcgtcggcaaaggcgctggcgtgcgcgttctcgacgtttgcggttttggcgcttgcgcttacgggatgtgcgccgaaagctaacgacgccgttgttacgggcgaagacgaggctgcggcagtgcaagtcgacttcacgtggtctgaaaccggcgattgcagtatgtgccacgcaaaggaacaggcgtcgttcgaagacggttcctgtgcgatatctcggcacaaggacgtggcttgctctcagtgccatgccgatgtagcagcgctttctgcggcgcatgaaggagccaccgctgaaaaggcagccaaggccgtcctcaaaaccacagcggtggatgttgcgacgtgcgagagctgtcactcgcaagacgaggtggaggtcgttacggctggcgtaaccgtgctaaccgacatgaatggaacgatagtgaacccgcatgcgttgccagaatcggccgaccatgccgaagtctcctgcgtgagctgtcatcagatgcatgcggcgggctccatcgagaagaaggctcagcgtgcatgcgccagttgtcatcacgccgacgtgtacgaatgctacacctgccatagctagggtttgcgcgaatccgcgcgaagggataacgcggttttgccgcgtgccccgccgcgccgagaaacggtcgcggcggcatataggaggaagggaaaggtacgattatggggaacgagaatgcacgcttctctcgccgaaactttttgaaggggaccggcgttgcggcgctggcaatggcgggcggtgcgctggttggatgctcatccggaaacgatgcatccgcttcaggtgtctcgtccgagtcgaccgctgtcgacggctcgtccatcgcgtggacgaaagaggccgacgtcgtggtatgcggctatggtgcggcgggcgcttcctgcgccatcgaagcggcggcgaacggggcttcggttatcattctcgagaaggcagcgctgccaggtggttctatggctcgttgcggcggtgccatcatgggtgcgccgacgaagatccagaaagctctcggcatcgaagacagtgccgacgcgttattcgattggataatgacctgcaccgacggcacatgcagcaaggatatcgcacgcgcttatgctgatgtggctggtccgaacgtcgactggctcgatgcgctcgccgaggaatacctgggtcagccgtgcttcgaggtggccatggccgaggcaaacgtcggcacagccgacggggggcacaacggagcggttggcggatgcctcgacgccacgggttgcgaatacgagaagttcggcgtcaaattggaggaagccgttccgcgcacccactgggccaaggcagcccccgacaacaccgcgaattcaggtcccgagctgtttgacccgttgctggcatgcatcgaaaagcagagcaacatcgaggcggtcttcaatacggcgttggtgaaactggtaacgaatgccgagggcgtggttatcggagtggaagccgaaggcgcgggcggcagggagttctataaggcaagcaagggcgttatgctggctacaggcgggttcccggccggtttagagatgcaggagcgattctgccaagacgcgctcgactatagcacgtatatgtgcaaagattgcacgggggatggcgtgaaagccgccatggccgtaggagccgatctgtacaacatgtgcaactattatcctatcgaggttgcgcaacaataccattacaacgtgcagtacaacgacgtgtacaacagttgggatatggattccgacggatacatggaagtgccggctatgaatatggcggaaacgcacggcggcctcgtcatcaacaccgacgcccaggttctcgacgtatggggcgagcccattccgcatttgtactgctccggttgcgataccggttcgaacatcttcggcattccgggcaactatcctggatgcggatgctacgtaagcttctcgtttgcgttcggccgcatcgccggcaaacatatggccgattcggaagccgtcgcttaggcacttctttgccgtgcggcatccctccccgccgcacagtcggtttcctaaaaggaaaggggctgcagtttgaactgcctcccatttcttggacaagaaagtaaagttcgagagatgggaggcttctttatgccgccgaagcatgacaggaagatgcgcgaactagcggtcgagctgttcgacgaggggtacggcagggacatcgtcgccgcgaggctttgcatgtcggccagcatcgtggaaaaatggcttctgacgtacaggtcggtcggaagcgaggtgctgctctgcatgggtagccggaaaacgagatacgcttgggagacgaaggtcgccgcagctcgggccgtcgtggacgaggggatgggcaagcccgaggccatggccgccttcggcatcgcgtcgaggaccccgctcgactcctggtgccggctctaccgcgaaggcggggccgacgctctcaggcccaagcccaagggcaggccgaagggatctgcggctcaaagcgcgcccaagacgcgcgagcaagagctcgaggcgcgcgtgcgcaggctcgaagccgagaacgcctacttaaaaaaagtccgcgccctggaggcggagaagtctcgagctgggagaagtcccaagtgatcgagatgctttcagggcaaggccacgctctttccgacctgttggcagccgccgggctcccgagatcgacttactaccgcgcccgctcgcacccgccgaggccgacgaggccggagctatgggagaaggtggcggaggtgttctcccgcacggccaacggctgcggacacaggcaggtcgccatggccctgcgcgccgaggaggacgtggcgatagccgacaagaccgcactgaagatcatgcacgagatgggcatcagctgcggcatccggcgcgagagcgactaccacaggtacaactcgttcaaaggcgttgtcggcagggcgttcgacaacgtcctggacagggacttctcagccgacgaaccctggcagaagctcggcacggacgtcaccgagttcaaggccccgtggggcagggcctactttgccccagcgtacgacttcggcagcaaggagatcgtgtcctggagcatatcgcggtctgcgaacatggcgcagcaaaaggagatgctggaaggcctgctggcgaagatgccggaggccgcgagcccggtcatgcactccgacatgggatggcagtaccagcacgacggttattgcaagacgctcgaggaggcgggcatcgtccagagcatgtcgagaaagggcaactgcatcgacaacggcgcgaccgagcaggtcttcggccatatcaaggacgagttcttccgcgggcagagcttcgagagcttcgaggagttcaaggagaggctcgaggcgtacatcgtccactggaacacgaggcgaaggcaggttaaactgaaaggactgaccccggaggaattccggaaccagtccttagcagcatagccacctttattttccttgtccaagaaccggggcgcagttcagttttgaactgcagccccttcgtgcgtcattggaagccctacccccggccagaaggatgaacccaccttaaaaggtgggtgctcgcagcccgcttcctggctttcgtgtcaacggacacgaatccccatttcacacgcgatcttgagctccctcatgtatcagcatcggtccatcgcaaagtatggctacgagggcaggacctgcttttgagtatatgggtagcatcgttaaaataaagacttgacatccggttgtttcgccgattacacaacccggtcttctacatgccgagcggctgcggatcgagcgacggaatgcgaggacgggagtgcgttgtcgcccgaaggcctcgttttcgggcgcgattccgagtttttcgggcgacaacgcaacgtccgctaggcaaacaagcgttcgcatgatacgatatatggcatggataccttatttaccgaaatggaaaacgagcggaagtcggaagtggcgcccttggcggtgcgcatgcgtccgcgcacgctcgaggaagtggtcggccaggacgaggcggtgggccccggctcgtggctgcgcaacgccatcgagcaggaccagttgagctcggtcatcctgttcggcccggcgggcacgggcaagacctcgctcgcgcacgtcatcgccgagacgacgaaggctacgttcgtggaggtgtcggccatcggcggcacggtttcggatctgcgccgcgaaatcgatgccgccgacaagcgcctgtcggcgttcggtttgcgcaccatcctgttcgtcgacgagatccaccgcttcaaccgcagccagcaggacgcgctgctgcacgccgtggaggatcgcgtgctggtgctggtgggagccacaacggagaaccccttcttcgaggttaactcggcgctgatcagccgctcgcgcgtggtggagctgcacgggctgtccgacgaggagatcgtcagcctcgtggagcgtgcgttggtcgacgagcgcggcctgggcggccgctatcggttggatgccaaagcgcgcgacgccatcgtgctgctggcgggcggcgacgggcgcgcggcgctcaccacgttggagcttgccgccggtatggtgcagcccggcacctcgaagaagcccgcgaagatcaccgagggcaacgtgcgcgcggccacgccgcatcgctcgctgccctacgacaagaacaaggacatgcactacgacgtcatctcggcgttcatcaagtccatgcgcggcagcgaccccgatgccgcgctgtactggctcgcccgcatgatcgatgggggagaagacccgaagttcatcgcgcgccgcatgttcattgccgcgtcggaggacatcggcaacgccgatccgcaggcgctgctcatcgctgaagccgcgttcaagtcggccgaggtcatcggctatcccgagtgccgcatcaacctggcgcaggctgccatctacctggcgctcgcgcccaagagcaacgcggcggaggcgggcatcgatgccgcgctgaacgaggtgcgcaacgggccgtctcgcaacgtgcccgaccatctgcgcgatcggcaccgccccggatccgagaactacggcgagtacaagtatccgcacagctaccccagcggctgggtgagccagcgctacctgcccgacggtttggagcgcggctgcttctaccggtcgagcgatcgcggctgggaggcctaccgcagcgacacgttcgcgcgagaccgtctggattccggagaaaaccccacgtcgcgcggaaggtaaccgattgtctactcctgtggaagcagggtgaaaagttgacctcggcctgtatatcatccaaggtgctcgtgctatagtaatggcttcggaaacaggaggcatacggtggatatcagcgaaattctcagcatagcgttgccggtggtctatgtgatcgtgggcgcggtgctggtgtggctcgtcatcgagcttgtcatgaccgtgcgcaagacacgcaagacggtcgacgatctgcagaggcaggtcgagcctacgctggcaagcgtggagcgtatcacggcgtcgctcgagcccgtcgcggcgaaggtggatccgctggtggagcgtgtgtcgctgacggtcgatgccgccaacctcgagatcatgcgcgtcgatcagattctcgaagatgtgaacgagatcaccgactcggtggcctcggccgtcgaagcggtggacacggtgaccaacgctccggtggaattggtgaacaacgtgacctcgcgcgtgcgcaacgcgttcaagtcgcgccgcgccagcgacgagtcggttgccctcggccaggcgaaagccgagcgctccgcctcccatggtgcgagcggacgcggcaccgaagtgcccgtttcgaccgccgacgtcgtcaagggcgtcgtgaccacctcggtcgcggccgcgaaggaggccgttgccgaccagcgcgagcaacgcgccgagcagcgtgccgagcgagacgagaaggcagaagccaaacgcgtcgccgccgataagacgtccgaagtcgccgccaccatggccgatgccgtggctaccgccgcgaacgccgatgccgcagctgcgcagcagtacttcacgtacgacgcagacgaaaaagcgaaccagggcaagtaacgacagcatacacggcacgaaagggcgactcggtggagactcccagctccgaagcgacgaaaaccgacaaagcgaagcgaagctttctcatagtctggacgatcgtgggcggcattctgctcacgggcgttctcgtttacctgttcaatattttgagcgtgcctatcggcatcgtcatctggtccatcgtcatcgtattctgcctgcgaggaccggtgaacaagctggagaaactgggcgttccacgcgtggccggcacgacgatcgcctacgtcctgatgttcgttgttctggctttggtggggcttctcatgttctcgccggcgttcggcgtgggcgaccagttcaccaacctcatcgagagcattccgggctacgttcagaccatcgccgggtggggcaacgacctgtacacgcgctacgccgacgtgcttcagaacgacacggtgcaaacgtggatcaacaatgcgctggacgccatcgtctcatgggcttcgacgttcgcccgcgatagcgccaacggcgtggtcgccatcgggacgggtctggtcaacacgttcgttgcgctcgggtttgcgctggtggtggctttctggatcctcatggagcttccgcagcttggacgcgaatgcatgcgcctcgtcaacccgaagcgccacgaggatctggaaatgctgcacgtcacgttcacgcgcgtcatgggcggctacatcaagggcacgcttttgcagtgcgccatcatcggcgtgggctgcgtcgttctgttcggcgccatcggcatcccgaactacgcggcgctcggcggcatcgccggcctgttgaacatcatccccatcgtgggcccgtggctcggcggtgcgcttgcggccatcgtgggcgtgttcgtcagcccctggatcgcggtcatcgcgctcggcggcaccatcgccatccagcagatcgtctatacgtttatttcgccgaagatcatggcgaactcggtggacgttcatccggcgctcaccctcatcgctttgatggcgggctccgctataggcggcgctatgagcggcttcacgggctcgcttgtgggtatgttggcttccattcccgccgtcgcggttgcgaagtcggttttcgtgtattatttcgaaaagcgcacggggcggcagctggtaagcgcagacggcgtgttcttccaaggcaccaccgcctcggacggcacgctcgatcccatcgccgatgccacgtcgccgcatcccgacatctcggcggcgttcgagcgcgtcgagcagcgcaaggccgaggccgatcagaaggcgcagcatcgtaagaagcgttgatcgggctttgttggcctgagcgcgtgggggcgtgcgggcgcacgtcgttagtggagcagcgggtcgtgcgaggcggcccccgaggagatagaaagacacgactatgaagtacatgaccagcgcggagatccgcgagaagtacctgagcttttttgaggagaagggctgcaagcgctggccctcgtcatcgctcattcccgacgacccgtcgttgttgctgacgagcgccggcatggtgcagttcaagccgtatttcctgcagcagaagcacctcgaagccccctacatcggtacgacgacggtgcagaagtgcgtgcgcacgaacgacatcgacatcatcggcaccacgggccgtcaccagagcttcttcgagatgttgggcaacttcagcttcggcgaatacttcaaggaggagatgtgcgcgtgggcgtacgaattctccaccgaggtgctgggcctgccggccgagcgcctgtacttcaccgtgtatctcgacgacgacgagaccatcgagatctggaagaagctgggcgtgcccgacgaccatatctcgcgcctgggcgaggatgacaacttctggcgtgccgggcctacgggcccctgcggcccctgctcggagatctacttcgatcagggcgaggacttcggctgcggcagccccgactgcgcgcctggttgcgactgcgaccgcttcctggagtactggaacctcgtgttcacccagtacgacgggcaggaagacggcacgttcgtaccccttccgaagaagaacatcgacacgggcatgggtctggagcgcatcgcggccatcctgcagggcgtccagtccaattacgagacggacgtgctgcgcagcctcgtggcggtgggcgagaagctgaccggaacgacgtacggcgaggacgcggccatcgacctatcgctgcgcatcatggccgatcacagccgtgccgtggcattcatgatcgccgacggcatcctgccctccaacgaaggccgcggctatgtgctgcgccgtctgctgcgtcgcgccgtgatgaagggccatctgctgggcctcgacaagccgttcctcaacgattacgtcgacgagatcgtgaacctcatgggtcacgtgtaccccgagatcgtggagaaccgcgagctcacgcggcgcgtcatcctgtccgaggaagagcgcttcggcgcaaacctgcgccagggccgcgcgttcctcgacgaggcgctggccgagctcgagggcgaggtgctgccgggcgaccgcgcgttcacgctgcacgatacgtacggcttccccgtggaggtcacgcgagagctgtgcgacgagcgcggcatcgaagtggatatggaaggcttcggccgctgcatggacgagcagcgcgagcgcgctcgcgccgccaatacgaaggacgccgaggcggcctggtccacctatggcggcgtgatggacgagatcctcgaggccgtgggtcccaccgaattcctcggctatacgaagaacgacgccgaagcgcgcgtgctggcgctcgtgaaagacggcgtgcaggtggatgtgctggaggcgggcgacgagggtcgcgtggtgttggacgctacgcccttctacgctgagaagggcggccagatcggcgacgccggcgtgcttgcgaaggacgatgccatcgtggcggtcctggacacgaaggagcccgagaagggcctgatcgcgcacaccgtgaaggtggaaagcggtcgcttgagcgcgggcgatgccgtgcatgccgccatcgacgtgccgcgccgcgagcgtatccgccgcaaccacaccgctacgcacatcctgcattgggcgctgcgcgaggtgctgggcgaccatgtgaagcaagcgggcagctacgtcgccgacagccgtctgcgcttcgacttcacccacttcgaggccatgacggccgaacagatcgtcgaggtggagcgcctggcgaaccagaagatcatggagaatcatcccgtgcgcgcctacgagacgtcgctcgcatcggcacgcgaagccggcgtcatggcgctgttcggcgagaagtacggcgagttcgtgcgcgtgctcgacatcgagggcttttcgcaggagctgtgcggcggtacccacgtttcggctacgagcgaaatcggcttcgttaagataacctccgagaccagcgtgggcgcgaacctgcgtcgtatcgaagccgtgaccagcttcgacgcgcttgcgtacatgaatcgcgtggaggctgagctcaaggaggcggccgagtctttgcgcgtgcccctgttcgacgtgagcgagcgcacggcatcgaacatgaagactttgaaagacctgcagacgaagttgaagcgtggccgcgaggccgtggccgacgacggcatcaacgccttgctcgagaccgcgcagacgagcgctgcgggctatccggtagtgttcggccgcatgccggaggccgatgcgggtcagatgcgcaacatgtgggacgtgctgcgcgcgcgtttgggccagccgggcgccgcggtgctggccacggagaaagacggcaagcccacgctgttggcggccggtacgccggaggcggtggaggcgggcttcgacgcaggcgccgtcatcaaggcgatctcggggaacatcaagggcggcggcggcggaaaggccgccatggcgcaggccggcggcaaagacgcctcgggcatcgacgcggctcttcaggctgcgcgcgacatgctgctgtagggttgttggctgggcgccgtgccgaggggtgcggcgcccaggcggtcctgagctcgctcgaaacgtccacaggacgtttcggctcgacgggtgcggcgccgcgaagcgaagcgtgacaagtcccgaaggggaaatctcgcggcgcacccctcggcacggcgcccgaggcggttcttccgctggagggcaccggctctgcgagcggagcttcaacctgcggggcgtctttttcggcggcttctccgtgaatcggagaagcccttttttcatcctggggagtgatcatgctgcctcgcttgcctcttcgggacgcgcgtgaccgtcttgtcgtcttcgtcaacctggggcgtgcgaaacggatcgagaaatcctattcggtcgtttggcgggctgattttggcaagaatttcgaggtaggtaaaagttaaatatatctaacttggctaaaagcgagcgtgtgagataaccgaccaggtgttttgcgcataagttacgatgcaaagacggtcttctggcgtcccacattcacctagctcaaaatttttgccatattctcgcacctcgacgacaagccgccgtctatcgaacgtgcgattttctcaaaagaggttgcgagcatgcttgcgctcttcgccaggttgccgcattgacgtacaataggctgaaagcggaaagccgcgcgtttccgccggtaacatgaaagggctcatcatgcgaattatggctttggatattggggatacgcgcgtgggggttgcggtgagcgatccgggggagcgggtggcttctccggtggccgtgctgcccgcctcggaagtgctgaactgcgcgaagccgttccagcgagtgcttgaggattgggagccggagctgctgctgtgcggacttccctacaccatggcgggcgcggaggggcctcaggccgcgcgcattcggaaagtggcgaaaaccatatccgacgcctgcggcatcccttacgaattcgctgatgagcggttaagttcgcaggaagccaaacggagtttgcgtgaaaagggcatgaccgagaaggccatgcgcggcaaaatagatatgatagccgcaagtttgtttttgcaggcgtggcttgacgcgcgccgtgaggcttgatggaagaagaggatcagttccatgccccagcacaggaagcaagtcacctattctcagcgtccgaaccatgcagctcgctcggctcatgcccggggcgagcgccagttccgtacgtacgataccagctatatccgcccgaagaaaagcaaggctcctgctatagtcgtcgccgttttggccgttcttgtcgtcggaggtttggcgtggggcgcgctcaccctgttcaacagctgttccgcgcaatcggtcgagcttctggccgagggtcaggaggccacgatcacggtggccgaaggtgctggtgccaaggtcgtcggagagcagcttgcggaagcccgtctggtttccaatgcgggagacttcacgaagcgcgtcaacgagatgggcgttgattcccagctcaagcccggtacctacacattcgcgggcggtatgtcgctcgacgccatcatcaaccagctgacggccggtccggtggcgaacgcgctcaccatctccgaaggaagcacgctcgaggccgttgcccagagcgtggcaaccttcaccgagaatcgcatcacggcggacgcgttcacggccgctgcgtcggatgccagctcatacgcggccgactacgacttcctggccgacgcgggcacgaacagcctggaaggcttcctgttcccgaaaacgtacgagatcggcgacgatgccacggccgagtcggtagtgcgcatgatgctcgaccagttcaagaccgagacgtcggggctcgattggtcctacccgcaaagccagggcctcaccatctacgatgccgtgaagctggcttccatcgttgagcgcgagtcgtcgggcgacgagcagatccgcgcccaggtggcctcggtgttctacaaccgcctgaacaacttcggcgatccgaactacggcttcctgcaaagcgatgcgaccacggcttacgagctgggtcacgaccccacccccgaggatatcaagaatccaacaccgttcaacacctacacgaacacgggtctgcctcccacgcccatctgctcgccgggtctcgattgcctgcaagccgtgtgcaaccctgcgcagacgaactacttcttcttctacttcgcgcctgatgaaagcggtacgatgcagtactacttcagcgaaacgtacgaagagcatcagcagacgttctcctaggccgttagcgacaacgccatggcttttctcgaacccgaccgctactttgcgcgcatctcgcgcatcgatatcgaccgcgacctgctggcgctggactttcgcaacgtgctgctggacgtggacaacaccatcctcacgcgtgacacccacgaagtgccgcgcgatgtggggttctggctggcgaaggcgcgcgatgcgggcattacgttctgccttgtgtccaacaactggcacgaaggggtgtaccagctggcgaaccgtctttcgctgcccatcgtggcgaaggccgtcaagccgttgccgcccgcgttcctcatggctttgcgcaagctgggagcgaagcgttccgagacggtggtcatcggcgatcagctggtcaccgacgtcatgggcgcgcattttctgggcatgaaggcgtatctgctggctccgctggtggagcaggatctgccccatacgctgctgctgcgcaacttcgagcgcgtcgtcatgggcgagcgtaagccggagggcgccgcatcgacgtcgcagaacgccgtcccctgcgaggatgaggaacccgacgcgcagggcgtctgatgtgaacgagcgagcgaaaggatcgttatgaccgacacgcaagccgaacggccggccgagagcctgtacctcttgggacatcccattgcgcactcttcgtcgcccgcgatgtacaacgccgtgtacgagcgcttaggattgccgtggcgctacggtttggctgattgcgcgaccgaggaagaggcgcgctcgttcgtggaggcgcgcggcttcctgtccatcaacatcaccacgccgtacaagccgctcgcgttcgaggccgccacggcgaaggctgccacggcgaagctcgcccagggcgcgaacgtgctggtgaagaagggtgacgcgctcatcggcttcaacaccgacggccagggctgcgtggcgtacttggagcgcacgggcttttgcttcgcaggcaagcgcgtggccgtgtgcggcacgggccccacggcgctgtccatcctgcacgcatgcgccatcgccggggcggacgtggccatgctggtcgggcgcgacaaggagcgctcccgcaaggtgctcgaaggctacgtcgagcggttcggcctgttggcaaatgccacggtggacctgccggcagcgcaggcgcaccatcgcagcttccgcacggcttacgagcgcaccacgttcaagttcggcagctacaccacgtccacgaaggcgctggccgccgccgatctcgtggtgaacgcgacgccgctcggcatgaacgagggcgacggctcgccgttcgacgtcgagcttctgagcgcggggcagaccgtgttcgacgcggtatacggccacggcgagacggcgctcgtgcgcgccgcgcgcgaagcgggatgtacggtgcacgacggcgccgggatgctggtagcgcaggcggtggctaccgtgcacgccgtgtgcgacctcgccgaggtcgacgtcgccctgtctgacgacgagctgttcgccttgatggcggaagcggcagggttcgacctgtagacttccgtcatcctgaacggaaccgactggttgcttcgtcatcctgggcggagcgcgtagcgcggagtcgaaggatcccgtgaggcgccagctgaaagcgtctcggttggcaccgtacgggatccttcgcgtccccgcttcgcggagcctccctgcgctcgctccgcgtgctcgggagttcgacagtccactggactgtcgaatgctgtgctcgctcaggatgacgagtacgtgagccatagggatggggttgatgcctcattcgatgcggatgcggcgtgcgacctgcttttcgctagccttgcctgaacggtagggtacaatacgatgcgaaccattcgtatcagcgcggaaagcgacagactatgcgatacctaacagcaggcgagagccacggtccgtgcctgacggccatcgtcgaaggcgtgcccgcgggcttgaagatctccgaatcgcagatcaacaccgacctttctcgtcgtcagtccggttacgggcgcggcggccgccaacgtatcgagcgcgataccgtggaggtcgtctccggcgtgcgcttcggccgcacgctgggaactcctatcgcgctcgtggtgcgcaaccgggactgggagaactggaccgatcgcatggccacgttcggcgaggctccgtccgacctcgcccgcgaggtcacgccacgccccggccacgccgacctcgtgggggcgctcaaaaccgacacgtccgactgccgcaacatcctcgagcgcgcaagcgcccgcgagacggctgcgcgcgtggcggcggccggcatcgcgcgcgagttcttggccgacctgggtgtggaggtgttctcgtacgtcacgtccatcggaagcgcgtccttcaaagaggacgacgcgctcatgaacgctcccgactacaagccgctggctatcgagacgagcgaggtgcgctgtcccgacgaacaggcgacggaggccatgaaggccgagatcgaccgcgcgaaagacgcgggcgagagcctgggcggcacgttccgcgtcgtggtgacggggctcgtgccgggcgtgggcggctacgctacggcggacgatcgtctgacctcgcgtttgggagcggcgctgttctccatccctgccatcaagggcgtcgagttcggtctgggcttcgaagcggctcgccgcgtgggctccgaggtgcacgaccccatcgcgctggacaagcaggtcggcttcgtgcgcacgtcgaacaatgcgggcggcctcgaaggcggcatgaccacgggcatgcccctcatcgtgagtgcggccatgaagcccattcccacgctcatgacgccgctcgagacggtgaacctcgacacgttggaagtcgaagaggcgtcgaaggagcgcagcgacacgtgcgccgtgcccgcctgcgccgtggtggccgagagcgaggtggcgttcgtgctggccgaggcgtacctcgagaagttcgggcgcgataacatggccgacatcaaggcggccgtgaaagcgtaccgccagcggctcaggacgatggcgcgatgaggcacgaggcttcgagacgacctcgcgtggtgggggagcttgcgcgccccgtgttcttcgtgggattcatgggcgcggggaagacgtcggtcgcgcgacggctggcgcgcacctgctgcgtggcctcggtggacatggacacgtacctcgagcgccgcgagggaaagcgcgtgaaggagatcttcgcgcaggcgggcgaggacggcttccgcgccatcgagacagacgtgctgcgcgagctggccggcaaggagccgctgctcgtgtcgtgcggcggcggcgtggtgaagcgcgatgagaaccgcgccatcctgcgcgatgcggggttcgtcgtgtacctgaaggtcacggccgacgaggcgaagtcgcgcatcagcgacacctccacgcgccctttgttccaggacctcgatgccgcgcgcaagacgtccgaggagcgcctgcccctgtacgctgaggtggccgacctcaccatcgacaccgccggcaagaacgtggctaccatcgcgcgcgaagtgcagagcgcgctcgagaaggagggcatcctgtgcctgcaacgaaagtgatcgtcaacatccccggcgaagaagcctacgacgtgcgcatcggcggcggcgtgctggcgaatctgggcgcgcatctgcgcaagctgccggtgttcgccgagtcggaccgcgcgctcgtcgtcaccgacgagaacgttgcgccgctgtatcgcgccgacgcgaaggaagcgctcgcgcaagccgggttccgcgtgagcgacatcgccgtgccggcgggcgaaggctcgaagtctgtcgaggtggcgggagagatatgggaggccatggccagccttgcgctcggccgcgactgcgtggtggtggcgctcggcggcggcgtggtgggcgacctcgccgggttcgttgccgcaacctatatgcgcggcgtgccggtggtgcaggttcccacgacgctgctatctatggtggactcgtcggtgggcggcaaaaccggcgtcaacctggcggccggcaagaacctcgtgggcgcgttcaaacagccggcgtacgtgtgcgccgacacggccacgctggccacgcttgatgagcgcgagtgggcctgcggttgcgcggagatagcgaagtccgcggtcatcgactcggacgacttcttcttctggctggttgacgcggcgggcgcgctggcggcgcgcgatgaggtggtagtagaggaggccatcgcgcgctcggtggtgttcaaggccgacgtggtggccgccgacaagtccgagagcaagggcgtgcgcgagtgcctgaactacggccacacgttgggacatgcggtcgaatcgctggcggggtacggcgcgttctcgcacggcgcggccgtggccgagggcatgcgcttcgccgcgcgcatggccgtgtcgctggtggacgcgccgctcgatttggtcgagacgcaggacagcctgctcgaccagctgggcctgcccgccctcgactggtcggccgagccggaggccatgctggaggccatgaagcgcgacaagaaggcccgtcgcggccaggtgcgcttcgtgctgccccgcgacgtgggttcctggcagctcgccgatgtcgacgacgccaccatcctcgaccacctgaacgcttgggctcgctcgaaggcataggggaggaagccgattatgaagaagattctggtgttgaacgggccgaacctcaatttgctgggagtccgcgagcccgacgtgtacggcacggtgacgcttgccgacatcgagcgcgaggtgacggaatacgcggccgagcggggtgcgagcgtcgactgcttccaaagcaaccatgagggcgcgctcatcgacaagttgcacgaggcgcgcggcgcgtacgacggcatcgtctacaatcccggtgcgcacacgcactactcgtacgcgctgcgcgacgccgtgtcgtccatcgacgtgcccacggtggaggtgcatctatccgatatttccgcgcgcgaggagttccgccgcatctcggtcatcgcgccggtatgcgtggcgcagatcaagggcaagggcaaagagggctacaaggaggccgtcgatgtgctgctcgcccgatagcgccgcgctcgctgcggctgccgggcctcgcctcgatcgtctccgcgccgcctgcgccgatgcgggcatgggcgcgttcttcgtgcgcgacacctcgaacatcgcctggctcaccgcgttcgacggcgtgttcgacgacgaggacgcgcacgcgctgctggttacgccgagcgatgccgtgctgcacaccgactcgcgctacagcgaggcagcgcgcgcggcggctgcccgcgaaggtgcggtcgcggtcgacgacgcacgggtcacccacgcgaagttcgtcgccgaaaccttcgccgcccgccatgccgaccggccgtcggtcgaggccgaagccatcgcgctcggcatcgaggactccatgtcgctcgccggctttcgcgccctcgaagccgccttcgcggaggttcccgagcgtccgaaactgcgagaaacgtctgacttcatcgtgaacctgcgcgccgtgaaagacgtgcaggagatcgcgcgcatgaaggcggcccaggccgtcaccgacgccgcgttcgcgcacatcgtggggtacatgcgtcccggcatgaccgagcgcgaggtgcagatcgagctggaggacttcatgcgtcgccacggcgccgagggccttgcgttcccgtccatcgtagccgcgggcgcgaatggcgcgagtccccatgccattcctggccagacggtgctcgaggcgggtcaatgcgtcgtgctcgatttcggcgcacgggcgcacgggtactgctcggacatgacgcgcacggtgttcttgggccagccatcccagaagatgcgcgatgcctacgcggccatccgcagcgcgaacgagcaggtggaagccgcgctcaagccgggcgtgacgggcaaggccatgcacgagctggccgagcgcgcgctcgcggacgcgggttttgccggcaagatgggccacagcttgggccacggcgtgggcatcgacatccacgagcagcccgcgctgtcgccgcgcaacgagcagcccctcgtgccgggcaacgtagtgacggtcgagccgggcatctacctgccgggcgaattcggcatgcgcctggaagatttcggcgtgatcacgcccgacggcttcgaggtcttcacccgatcaacccacgatccggtgatcctgtagccggcgggctctcatcgccgttctcacgcgcgtgcaccttcccagaggttctcgagcagctgctcgcgcagctcaaggtgcttgcgggtgaactcggggtcgtggtagcgcagccgcttgcctgtaagcttcgccacttgccgcgcaaggcgattgaaggttccgctatccgtgatgtggccggggaagaccgttatcacggtgaatccaagcgcgatgagcgtgctgcgccgtcgcgcatcgctgctttgtcggcctggctcggaatgatggagccgcgagtcgtactctaccgcgaggtttgcttccggccagcagaggtcgcagaggcagtagctgcggtcggcaagttcgcgcaagctagccggtgcgtcaacgcggtagttgagcttcggcttcttcagcccgtagccgcccagattgttcggcaaatacagcagcagggcgagcaaggtttccatagcagaggccgagccgtccaacaggtagcgcgttgcgcgcaacgccgtggctcgcccgggtgcgcccgctgcggcttcgacgaaggctctcagcttggcggctgtcgtgagcggggcttcgcgcgagatcgcgggtccgttttcggccaatgcgtacgttccgcatagttcgagtccaagctgtacgagttgggcgacggtcatctcgcgagccatttgcaggaagcagaactccggcgtgctgacaagaaatccctgtcctgcatcgacaaaggagcttgccggcaggctcgtccacttatggctgaccaggctcgctgtagtcgttctggcttcggttgtgccgacgattgcgcgaacgggcagcttgcatccggccggtcggcggtttccttgcgcaagccgcggcttcgaggggcacgacaacgctttcgtcgcgcggcgcgttgcggtccttcgttcttgatatccgcgcaggaagccagggccgaccaatcgccagtattcaagagcggagcgatatccgataagtatatccatgtcggccactatagaagaatctggcagaaaaatcgagataggcaaattgaacagcaaggaatgccccttcgcgtatcgagggcaagaacaaaatgccagatcacgtctttcgtaagctgtctttgagagcggttgcccgtatggaaatttacttacctcgatttttttgccgtaatcggggatgccggcgaccgcgtgcgcaggttggcgaccgcgtgaacaggtgggaggcggtgtgcgcatgcatcgtcaaggcgccatgccctgatttttttctgatacggttgatgtgcgcacgcaaggtttgcccgacacgctataatgtaccggtttgaacgctgatcgggccccgcggcgcgcagcggatcgcccgtgaacgaaaggattaccgagtatggctatctctaccgccgatttcaagaacggcatgtgcatcgagtttaacggcaagctgtgcaccatcgtcgagttccagcatgtgaagcccggcaagggcagcgccttcgtccgcacgaagctgcgcgacatcaagactggccgcatcatcgacaacacgttcaacgccggcgtcaaggtggaatccgtgcgtctcgagacgaagaagctgcagtacctctacaacgacggtgccgatttcaacttcatggacaacgacacgttcgagcagatggccatctcgaccgaaaccgtcggcgatgccgcgaagtggctcaaggagaacgacgaggcgtcgctgctgtacgctggcgacgagctgatcagcatcgagccccagatgttcgtcgagctcgaggtcacgcacaccgagcccggcttcaagggcgacacggccactaacacgacgaagcccgccacgctggagaccggcgtcgaagtgcaggttcccacgttcgtcgagatcggcgacgttctgcagatcgacacccgcgacggccgcttcatcaagcgcgtgtagcaagcgcgaaaccccgactcggctcaatggaaacgagggcgcccgacgggcgccctcgttttgttcgtctacatacgcgcgtggttgtcgggcagggggaggggatagtcctccagcttgtaagcggcgagatcgagcagctcgccggggttcacgtcgagggcgcgggccagcttcacgatgtcggagaggcgcacgtccacgaggccgccttcgaggttgctgatgcgaggatgcttcgtgcccaccatctcggccaaggtgttttgggagagtccttcggaggtgcgcacttcgagaagccggctgcccaagtcggcagacaggcgctggacaaggggatccttgcgcgccatcttctcgtttttgctcatctcgctcatacagaaagcgtaacggcgcgcaaaacccaagccgtcatccagcgattacaatgcagcgtctttttgatgagcgtgctgcatacgtatggccgcctcggcctcccgccgctcgaaatctgttgcttgtcggtgaatttccccggtcatggctatcgcggcaaggggttactctataattcttgtttcgatctttgactaactgcaaaccgaagggggtgtgagttcatgccaaggcttcagatcatggataccaccatccgtgacggccagcaaagcctctgggccacgcgtatgcagatcggcgacatgctgccgatcctgcctaaaatggaccgtgtcgggtactgggccatcgaggcgtggggcggtgcgacgttcgacacgtgcatgcgtttcctcgacgagaacccgtgggagcggctgcgatccatcaaggcgcagacgccgaacacgccgcttgccatgctgtctcgcggccagaacctcgtggggtacaagcattattcgcgtgacatctgcaatcacttcatcaaggccgcgaagcgcaatggcgtgcatgtcttccgcgtgttcgacgcgctcaacgacatccgcaacgtcgtcgacaacgccgaagccatcaaggaatgcggcggtcacttcgaaggcgccatctcctacacgatgtcgcctgtgcacacgctggacagcttcctcgactacggccagaagctcaaggacctcggtgccgactccatctgcatcaaggacatggcgggcatgctcacgccctaccgcaccgagcgcatggtgaaggcgttcaacgccgaaatcggtttgccgttgcacatccactgccattacgtcggcggcatggcgcccgccaacatcctcaaagccgccgaagccggagccgccatcgccgacacggctcatgcgccgctggcgttcggcaactcgcatccggccgtcgagatgatcgtggctgcgctccaggagagccgctacgacaccggcctcgacctcgacctcctgttcgagatcgccgaatactgggaagacatgcgcaagcgcggacactacaagcgcggcgtctcgtcgctcacgcacatgcaggtgtactcgcaccaggtgccgggcggcatgatgtcgaacctcgtgtcgcagcttgagatccagaacgccgccgatcgcctgcccgaggtgatgcgcgagattccgaaggtgcgcgccgaggtgggctatccgccgctcgtcacgccgttgtcgcagatcgtgggcacgcaggctgtgttcaacgtgctcaccggcaagcgctggagcgtcgtgtccaaggagatgaaggactacatctgcggctactacggcaaggctccgggccgcatggacaaggacatcgtggcgaaggtcgtgggcaactccgaaatgctgccgcccgacgtggcgcccggctcgctggtcaccaccacctacgctcaggttgaagaagagatcggcgacctcgcgaagagcgaggaggacgtgctcatgtacgccctgttcccgaacgaggcgcgcacgttcctgagcaagcaccgcacatcggagaaggtcgatttcctcatggagcaggagtcgagccacaccaaggaggacgattacgtggacatcaatcagattcgcgagctggttcgcgtcgccgaggaaagcggcgtcggcgagatcgtagttgaggaagagggcacccgcatcgccgtacgcatgccgggaacgatgtcggccgaggccgctgccgtggccgctgcggccgcgccggttgccgccgtggctccggctcccgccgccgctccggcagccgctgccgacgacgtggagcgtccgagcgattggtacgccgtcacggctcccatggtgggcacgttctatacctccccggcacccggcgaaccgccgttcgtgcaggtgggggacgaggttgccgccaaccagacgctgtgcatcgtcgaggccatgaagctcatgaacgagatcgccgccgaggagatgggcaccgtccgcgaggtgtgcctcgaggacgccacgcccgtcgagttcggcacggtgctgttctacatcgagccccacggtgccccggctccggctccggagacggcataatgtttaacaagattctcatcgcgaaccgcggcgaggtggcgctgcgcatcatgcgcgcctgcaaggagctgggcgtgaagacggtcgcggtctactcgaccgaggacgccgacacctatcccgtgcagtacgccgacgaggccgtgtgcatcggccccgctcaggcgaacaagagctacctcatcatggccaacatcatcgccgcggcgaaaaccaccggcgcggaagccgtgcatcccggctacggcttcctcgccgagaacgccgacttcgcccgcgcctgcgccgataacgatctcgtgttcatcggcccggctcccgagtgcatcgagcgcatgggcgacaagagctccgcgcgcgagacgatgaaagcgtgcggcgttcccaccgttcccggttccgacggctgtatcgagacggcggccgaggctaaggcgttcgccgacagcgtgggctatccggtgctcatcaaggccacggcgggcggcggcggcaagggtatgcgcgaagtgcacgacccggccgatctcgaggctcagtaccaggccgcgcgcaccgaggccggggcagcgttcggcaacgacggcgtgtacctggagaagctcgtgctgcgtccgcgccacgtggagatccaggtgctggccgacgacttcggaaacaacgtcgccctgtgcgagcgcgactgctccgtgcagcgtcgtcatcagaagctcatcgaggaagcgccctcgccggccctgaccgaggatctgcgccgcgccatgggcgtggcggccatcaaggccgtgcgcgccgtgaactataagaacgctggaaccatcgagttcttgctcgacgagcgcgggtcgttctacttcatggagatgaacacgcgcgtgcaggtggagcacccggtgaccgagcagatcaccggcaccgacatcatcaaagagcagctgcgcatcgcttctggcgagcccatgagctgcgcttcccgtgcgccgttctcgcctgcgggccatgctatcgagttccgcatcaacgcggaagatccgcagcacggcttccgcccgtgccctggcaccatcacgaaattcgaagccccggccggccccggcgtgcgcgtggaaagctacgtgcgcacgggttcgcgcatctcgccgtactacgattcgctggtggcgaaactcgtggtatacggccaggatcgcgaggaagcgcttgcgcgcggtcgccgcgccctcgacgagttcgtgatcgagggcatcgaaaccacgatcgccttccatcgccgtgtgctcgataacgcgatgttctgctcgggcgatgtgaccaccgacttcatcgaaacccagatgggagacgtactatgacagagcttaacgtcgacggcatggcgcttgcgccgggcgtcgtcgaaaccatcgtgtccatcgcggccaacgaagtggagggcgtggcctgcatcggcccgtccaccacgagcggcctgcgctccgtgttcggcagcaagccctccactcagggcatcgacatcacggtggacgaggaggacaagctgcacatctccattcgcgtggacgtgtactacggctatgtgctgcccgacctcgccgccaacatccgtcaggctatctccgacgcggtgaccagccaggttggcattccggtaggctctgtggacgtgtacatcgacggcatgcagttcgcccgctaagcgtccggaggctttaagaatctatatggctgctaaacgacatgaacgaaccagcgcgcgccgtgccgcgctccaagtgctgtacaccagcgagataaccgacgagtcgcccgcggcaatcgccgagggcgaccgtcgcctggaagaagacggtccgctgcccgaatacgcgttgatgctggtgcgaggcgtggagtcgcatcgcatcgctatcgacaaccaccttgccgccacgtccgagaactggtcgttggcccgcatgcccatcgtcgaccgctcgattctgcggttggccacgttcgagatgatgtacatcgacgacgtgcccacctcggtcaccatcaacgaggcggttgagctggcgaaggacttcggtggggaagacgaatcccatcgcttcgtcaacggcattctgggtcgtatcgccaagatgctggagggggaggagggccaggaggccgatgccccttcttcttgcgacgcggatgccgctggcaacgaagagcctctggcgatgcgggagaacgaaatcgcggaacccgaaagcgagcccctcgcggctcagaagtgcgggtcgccggagcaggagggcgagtcgccggaaggagcctcctcctatggcgcttgagtcgtatgatagcttcgaggcggtaaagtcccgcctcgaagaaatcgtcgacgcggtgagcagcgacgagctggagcttgacgctgcgctcgccttgtacgaggaagcggtaggactcgggcttcgcgccagcgatttgctcgaggagaacatcgaagcgcagcagggcgtcgaggaagcgggcgagcggtctgccgagtcgtccgacgaggcgtctgcgcaggagacgggtgcgccggtttcggcgtagcccctgttgaaggatgcatatggataatcgtattctcgatatggtgtcgtcccctgccgatctgaaactgctcacgaacgaagagctgtccattctggcgcaggaggtgcgcgaggagatcgtgacgacggcttctcaaaccggcggtcacgttgcgtcatcgttgggcgcagtggagatcatcctggccttgcacagcatgctcgattgcccgcacgacaagatcgtgttcgacgttgggcaccaggcttatgcgcataagctgatcaccggccgcctcgatgatttcggcacgttgcgcacctacggcggcctgtccgggtttccgaagcccgacgagagcccctacgacgtgcatccgtcgggtcatgcgtccgactcgctgtcggtggcgctcggtctggcgcaggcgcgcgaactctcgggcggcgacgagaagatcgtggtcgtcatcggcgacgcggccctgtcgggcggtatggcgttcgaagcgctcaaccacatcggccaggcgcagacgcccatggtgatcatcctcaacgataacgagatgtccatctcgcgcaacgtgggcgcgctcatgaagcacctcggttacatgcgagccacgcctcagtatcgtcaaacccgcgactccgtgcaggaggcgctcgagagcagcggggctttcggcagcgcgcttgcgaacttcggacgcaacgtgaaggagtcgatgaagcagttcgtcatcccgcgctcgatgattttcgaacagctgggcatcctgtgcacggcgcccatagacggtcatgatatcggcctgctcaaagagacgttggcgtccgtgatgaacaccgacgttcccgtgctcgtgcacgtggtcacgcgcaagggcgcgggatacgcgccggcggtccagaaccctgagaagttccacggtatcgcgccgttcgatatcgcgacgggggatgtgaagaagaaagcggcatcggcgccgtcgtacacgagcgtgttcggcaaggcgctggccgccgaagcgcgacgcgacgagcgtatcgtggccatcacggccgccatgaagggcggtaccggcttggacgcgttcgccgaagagttccccgatcggttcgtggacgccggcatcgccgaggagcacgcggtgggcctggccagcggcttggcgacgggcggcaagaagccggttgtggccatctactcaacgttcttgcagcgagccatcgatcaggtcatcatcaacaacgcgctgccggatctcgacgttgtgttcgccatagaccgcgccggtatcgtgggcgaggacggcccgacgcaccatggcatgttcgacctcgcctacatgcgcatgatcccgcatatgaggatgctggctccttccaacgaggccgagctcgtgcatgcgctgcataccgcgctcgcgctgggcgggcctttcgctatccgctacccgcgcggagcggccgagggcgtagccttgcccgacgagccgcaggtattggaagaggggaaggcgcgcgtggttcgcgaaggcgacgacgtggccatccttgcgttcgggcgtatggtgccgcgcgccgaagcggcggccgagctgctgtccgagaacggcatcgaggcgcgcgtggtggacatgcgctgggtcaagccgctcgatgtggaagaaatcgcccgtgcggcgcaaacgaagctcgtcgtgacggtggaaggcggtatcatctccggtggcgtaggcgaggccgtgctgggcgagctggcgcgccaaggcctcgcggtccccgcgctgacgttgggcatccccgacacgttcgtgccccagggttccacgaaccagctgttgcacgacctgggcttggacgccgaaggcatcgccgcttccgtgcaggagcgtctcgcgcggtaaaaatgatcgttcttggcatgaaggcgccggctgcaattgtgcagccggcgccttttctttacattcggcgcatccttcgcgcgcatgtgacaagcgattttacctaaacttgatctttccgttgcctgatcctgacattgcatccctatcattgctccgagtgctttgtcttcaacgttcgggttcggaggaaaccggcatgagctatgatctgggagcgttcgccgcggcgctcatgggcgacccggtgctcgctctcatcgtcgtcctgacgctgggcgccaccgtggtgaacggggctaccgacgcccccaacgccatcgccaccgtggtgggcacgaaggctatgagacccggtcccgccattgcgatggcggcggtatgcaacttcgtggggttggccgccatcacgatggtgtcgtcggctgtggcgctcaccatcttcaagatggtcgacttcggcggcgacaaccaagccgccctcatcgcgctcgcggcggccatggtggccatcatcgtctggggtgtgactgcgtggtacttcggcatccccacttctcaaagccactcgctcatcgccggcatcaccggcgcggccatcgccctgcagggcggcctgacgggcgtgaacggcgacgagtgggtgaaggtcgtctacggcctggtcatctccacattcctgggcttcggaactggctggctgttcaccaggctcatcaagaagctgtgctgccgcgcttcgcgcgcgaaggcgaactcgttcttcaaatgggcgcagatcatctcgggcgcgggcgtggccgtgctccatggggcgcaggacggccagaagttcatgtcgttgtgcatgctgggtatcatgatcggcatgagcggcgcggtggacgcgaacgtcgagttcccgttctggctgatcatcctcgtgtccgccaccatggctttgggcacggcggtgggcgggaagaagatcatcaagtccgtgggcatgaacatggtgaagatggagcagtaccagggcttcgccgcgtgcctgtcggcctgcttctgcatcggtctggccacgttcaccggcatgcccgtgtccactacgcacacgaagaccaccgccatcatgggcgttggcgccgagaagagcatccgcacggtgaagtggggtctggctggcaggatggtgctcacctgggtgcttaccttccccggctgcggtttgctggctttcgcgttcacgcacctgtttctgatgttcatgtaggcgttcgatcgggcggggctttggtttgccgcccggaaatgctgcgacccccggatcgggggtcgctttcatgcgttagtcctcttccaccacttcggcttcgggcgcgttcttcttgacgctctcgatgcccttcttgcaggaatccttcgtcgtgtacacctgcgacgtggcgatgacctcgccgttgtcggccttcagcacgaagtggcatcccgcgtcggtggtcttgatcacgaactttcccatatgatcgcaccttttctcgagtcctttgccggtacgtcgatcatacctcgtgcaaagtgcgacgttcgtcctattcgggagactaaacgtagggttgaaggtaactcgccgttaccggagtgtctttcgtttttccggttcgtcgcagtcaagctcatcgattttggcacgaattcacggtttgggcagaaggtttaggactcggaaaactcatgacctggcattatgctgttgcacttgccatgcaatcggcaaaatagatgcagattcgtgcccgaaccgtgaattcgtgccagattcgaggggcgcgaccgaaacgttgctgaagcagatgggggcgcggcgggttcgcgcacggatgccgacaacggtaggtcggggtgcgcgcggaagcgaggcggtggcaggacgctcgtgtccgcaggggccgcgcgagttcgcgaacctgcgcgctcggcgcgccgttcgctagcgctcgacgtgcttctccatgatgtagtcgtccatgacgaagccgttgccgatatctgtttccaccgcgtcgatggtttcgaagcccttgccgagataggcccggatgcccaggtcgttgcgcttgttcaccgtgagatacatcgcgtccagcccgcgttcgaggcagaggcgctcgtagaaggcgatgacccgcgaggcgaatcccttgccgcgctcctcggcgcgcagatacaccttcgagatgaagaagcggttcgtctcgggctccacgcgcccgcccgtgtaccccgcgatgcgcccgtcgtcttcggcgcgcatgagccaatattcgtaggcgtgctcgcgcatgtcgcgctcgatggcttccaggctttggaagttctccaccatgtagtcggtctgcgcgtcgccgatgagggcgggccagtactcgtgccatatctcgtcggccagcgcggcgaggcgctgtcggtcgtcggtggtgcggacggcttcgaatgcgatgctcatggaactgcaacctttcacggatggcggtcgtgcgtgtttccctattgtaacgcgggcgcttcgtgtttgttacaagacctttcccagcgtgttaacagtgctcgccgcggcgcaatgccaggtcaaagcgtgggatcatcgaatatgttctcgacaagcagcacgacgataaggaggtagatgcgtatgttcgacgcaggatcgacgggcttcatgctggtttgcgcgatgctcgtcttgctgatgacgcccggcctggcgttcttctacgggggtttgagccgccgcaagaacgtcgtgaacacgatgatcatgtcgtttgcggtgatcggcatcgtcggcgtcacatggacggtgtgcggctggtcgttcgcctacggcggcgacggctcgattccgttcttcgggggcttcgatcagatcggcctgcaaggacttgtggccggcatcgtgagcgaggcgcccgaagcgctgagtcacgacgcgtatcccgcgatggccgacgtagtgttccaactggcgttctgcatgatcaccacggccatcatcaccggcgcggtggccggtcgcatgaagttcggcgcggtgtgtgcgttcgtggccgtatggaccgtcatggtgtacccgccgctcgcccacatggtgtggggcggcgaaggcagcctcgtgggcgacaccatcggcgcgctcgacttcgcgggcggcgacgtggtgcacatctcgtccggcctcacggggctcattctctgcctgatcgcgggcaagaggcgcgggttcggcatggtgagctaccgtccccacaacgtgccgttcgtggcgctgggcgcgacgcttctgtggttcggatggttcggcttcaacgcgggctccgagttcgcccccgacggcgtggcggcgctcgcgctggcgaacacggtggcggcgtcgggcgcggcgctcgtgtcctggatgctcatcgagcgcgtgcgcgcaggcaagcccacgctcgtgggcgcggcgaccggtttggtggcgggcctcgtggtgatcacgccggcggcgggcttcgtggagccgtgggccgcggtggtcatgggcctcgtcgtgtcgcccgtgtgctacttcgccgtgtcgtttctcaagcggaagctgggctacgacgacgcgctcgacgccttcggcatccatgccgtcggcggcgtcacgggcggcgtgctgaccggcttgttctgcgtgccggagctgtcgtggaccgacttcggcggcctcgtctacacgggagatcccacgctgctgggcgctcaggtgctgggcatcctcgtgaccgtggtgttcgtgggcgtgctcgacgtggtgctgggcttcgccgtgaaggcgtgcttcaagggcagcctgcgcgtgagcgaggccgaggaagcgcaaggcctcgacgtggccgcgcacggcgagagcgcgtacccggcctacgtgggcctcgactaaagaaggagtgcgactatgaagaagatcacggccatcgtgcggcctgagaagctggagccgctcaaggaggcgctgttcgccgcgcaggtgtcgggcatgaccatctcacaggtgcagggctgcggcaagcagcacgggtggaaggagtactaccgtggcaccgaggtcatgctgaacatgatcccgaaggtgaagttcgaactggtggtggacgacggcgaggtgggtccgctcgtcgacctcatccgcgctacggcgcgaaccggggaagtgggcgacggcaagatattcgtcttccccgtggaagacgtcgtgcgcatccgcaccggggaaaccggagaggatgccgtgtagaagatgcggggctgaccgcccctacgtcgcaatgcgtgacggctccgtaggggcggcctgctggccgcccgtcgcttctcggcgcctcagggccgggatccccttcacggcagtggttttcgtgatcccgcgtagccgaaccggccgtttctggcgagcgcatcgcaagcgccgggcaatcggccgaatcgggccggtttgtggacgttcgcgggaacgcggcggccgttcgtgatgtgtgcttgtctttccatactaatgatatataatcctaattaatcaatagtatgggttagatatgcgaacggcaggactattatggctacggaaaaagcagagcgcgccacgacgcgcaacactattcagagagcgctcgtcttggaggcggtgcaatcactgcataaccatcccacctcggcagacgtgtacgaggtggtgcgcgcgcgccaccccaatatttcgcgtgccacggtgtaccgcaacctcggcgtgctggcgaaccgcggggaagtgctgcgggttgaagttcccaacggcgccgaccgctacgatttcctcaacaagccgcactaccacgcgaagtgccgcatatgcggcggcgtgttcgacatcgacatgccctatcaggacgatatcgtatcgcgggtttccgatgcgcacggcttcaccatcgagcatcacgagatcattttcgacggtgtgtgcgcccactgcaaggctagtgccgagaactgatcgagccttttctaccgtgcggagagagtcggaattatcgtgagagttcgtcaaaatgagcgcagcggccgggtgccgctgtgctatactactatggcttatagcacggaagctgtaagcgtacggtaatgtaggcccccgagacatgtttgttacaccgctgcacgggcaagtttcttgcacaagcgaacatggtgaagtagcaagtaatcatgacgaagggtccccgattagaaagaattgaaaggggtccgttttgaccgacatcaaaaacacgtccgtcatcgacttcgaggacatctccgacgagcagatgaacgcgatgatcgacggcacgctgaccgagttcgacgagggcgatctggtcgacggcacggtcgtcaagatcgagcacgacgaggtgctcgtcgacatcggcttcaagagcgagggcgtcatcccgtcccgcgagctgtccatccgcaaggatgccgatccgtccgacatcgtggagctgggcgagaagatcgaagccctcgttcttcagaaggaagacaaggacggccgcctgatcctctccaagaagcgtgccgagtacgagcgtgcttggattcgcgtcgaagagaagttcaaggccggcgaagtggtcacgggcgaggttatcgaagtcgtcaagggcggcctcatcctcgatatcggcctgcgcggcttcctgccggcatcgctggtcgaccttcgtcgcgtcaaggatctcgacatgtacctgggcaccgagatcgaagcccgcgtcatcgagatggaccgcaaccgcaacaacgtcgtgctgtcccgccgcgtgctgcttgaggaaggccgcaagaacgagcgcgccgagatcctcgcgaagctgtcgaagggcatgcgcctcaagggcaccgtttcctcgatcgtcgacttcggcgcgttcgtcgacctcggcggcatcgacggcctcgtgcacatctccgagctgtcctggaaccacgtcaaccatccctccgaggtcgtcaaggtcggcgacgaggtggaggtcgaggttctggacgtcgatctgcagcgcgagcgcatctcgctcggcctcaagcagacgacggaggatccgtgggtcaagctcgtcgagagctacccggtgggcaccatcgtcgacggcaaggtgacgaagatcgtgccgttcggcgcgttcatcgagctgggccagtccatcgagggcctggtgcacatctccgagatggccatgcgccacatcgacaccccggctcaggtcgtgaaggccggcgacgaggtgaaggtgaaggtcatggagatcaaccccgagcgtcgccgcatctccctgtccatgaaggccgctgcggccgacctgggcttcgagatcgaagtggacgagtccatccaggttgaggagaagccggccaagaagaaggccgagaaggccgacgctcccgccgaggaagccgccgctcccgaggctgccgaatagcctaagcgtccataacgcgtatatgagaaggccggtcgcaagaccggccttcttttgctattggagccgacgacgcaagtgccggctcttttctgaacgcagacgcttctatgcgaagatgaacgaagccaaaaacgctagggcggctacccacataaggggcttcacgtcgcggaacttgccttgggcaaccttgatgatgcagtaggagatgaagcccaagccgatgccgttggcgatggagtacgtcatggggatgcccacgatggtaaggaatgccgggaatgcagaagcgatgtcgctccaatcgatttcgccgatctcggtcatcatgaggtatcccaccaccacaagggctccgcaggtggccgagctggttaccatgccgataaccggcgcgaggaacgcgcaagccacgaacgcgatgccgatgacgatgttcgacaggccggtgcgggcaccggctgccgcgccggagacggattccacgaacgacgtgatggagctcgccccgatgaagccgccggctgccgccgcggccgaatccacgatgaggataggctgcacgtcttcgacatcgcctttcttgtccacgaagccagcgcggctgcctacggccaccacagttcccatggtgtcgaagaagtcgctcatgagcaggctgaatacgaacagcagtagcacgggctgcacgatgacctgcgcgatggccagcgtgccctcgggcgtgacttggaacggagctgcgaatgcggagaagtcgggcgcgaacgagaagtcggtgacaggaggagtcacgcccatcggaatgccgatgatagtggccgccacgatggagatcagcagggcgcctttgagattgacggcggtgagcaccacggccacgatgatggagatggcggccacaatggcggtcgggctggtgagatcgcccagcgcaaggaacgtggattcgtcggcggcgatgaatccaccgcccttcagcccgatgaatgcgatgaacaaaccgatgccgatgccgatggcgcgtctgagagatacggggatggcatccatgacggctttacgcaagccgcaaagcaccagcagcaagatgaggatgccttccaggaacacgacggccatggccacgcgccagtccacgccgaggccgaggcacagcgaataggcgacgatggcgttgatgcccatcccggaggcgagcgcgatgggacggttcgcgaacaggcccatcgcgaccgtcatgatggcggcgccgaaacaggtcgcggtcagtgcggcgttgaacgggattcccgccgcctccatcatcgccggattcaccgcgatgatgtacgccatggcgagaaacgtcgtcaggccgccaatgacttcgttggagacagtgctgcctcgctcggatatcttaaagaacttgtctagcatgtagaaaccccctcgttgttcgcgtgggcctgcttagcaggattcccatcgtttgtacattgccgctttcgcattgtacaagtccgattacgaaacgggaagggtataagcgcctttcgaagatgcttcaggctggcggcgagggttactctcggggctttagattgctcgccgcgttcgcggcgagcgcgcgcacggtgtcggaggaggctttctgtgcgttgtcggcagccagttcgagcggcgacttgaccacggcggcttcgtcgctttcggcgtggacgggcagcagcggtgcgacggcatcgtggacgaggcctatgtaggctcgcgcgccctcctcggtgagatgggtgccgtctccgtcgaagtactcgtcgtggccggcgctggcggtgtaccagtcgatcacgtgtacgttgtcgtggcggtcgaccgcgtcgaacatggcgccgttggtctggcctacccacgattgcgggctgcgggtgttcacgaagaacacctggcggccgggtccggtcgctgccacgagttcgtcgatctgctcgtcggtggccgctccgttcgtgccgagggcgaacaccaccacgcctcccacgatatcctggtcgttatagtagtcgaacgtctcctggccggcgtacagctggcggttcacggcggcgtcgatcgcgccgtaggggaacgtctcctcgaactgggggatggcgcgcaccgagaccgaatcgccgatcataagcacgtcgagcttgggcgactcggccgctgcgtcgtcgacgggcagctcgggcatctgcgaggtgtgggcctgctcgtccttcagcaggtcggcggcgccgatggcggaggtgggaggcaccacgataaggccgatcacggccacgatggtcacggccgaccccgctaggacgggaacgacgtggtgcttgagccatgcgggcggatcgatttctttcgagcgcacgcctttcgcgaacgctccgatggcccccttgcgcaaggggttctccacgaagcggtacgagaacgcggcgcaggcgaacacgacggccacctgcacgagatacatccaccacggcgtctcgcccgtgaagttgcgcgggttcatgagcaggaacagcgggtagtgccacaagtagatgccgtacgaacgcaggcctatccatacaagcggcttcgttccggcgaagcgcccgagcaggctcgcaggatgcaccatcaccgcgatgacgacggcggtgagcacggaggccagcaggatgccgccgcggtagaggaacggcgagaagccgtccacgaacacgatgaggcccagcagggcgacgagcgcgacgattcccacgccgtccaggacgttgcgcacctgcttcgtaaggtgcacgctcttctgggctcccagcatgtgcgagggccacacgaacgccagccatgcgccgataagcagcgagaacgcgcgggtgtcggtgccgtagtacacgcggctcgggtcgtccagcgggttgtacagcagcgccatctccagcgccgacaagagggcgacgatcagcgtggcattgcgcatggtggtgcgcttcacgcccgttttgtgggcgaccagcagcacgaccggccagacgaggtagaactgctcttcgatggcgagcgaccagaagtgggtgagcggcgagggagcgcccagcgcgtcgaaataagaagcatcttggaagatgtaccaccagttcgtcacccagagcagcgcggcccacatgtcgtcgcgcagcttcgtgagcaggctgtggtcgagcaaggcgcagagtgcggcggtgcatacgatgaccagcacgatggccggcatgagccgtcgcacccgtcgcagccagaattgcggcaggttgatggtttcggtgttgtcccactcgatgagcagcaggctggttatgagatagcccgacagcacgaagaacaccgtgacgcccaacaggcctccaggagcccattgcatcccaagatggtaggcgataacggcgaggacggcgaacgcgctcagtccgtcgagtgcgggaatatagcgtgatttcgtccccgacatgcgagccttgccctcccttcgattcttcgcgcccctcgggcgcgaattgccagtataacaatgtttctacatctcgtccgcaacataaagagggtgagagattcttcatacgccattcaacgaagcgctgaagcaaggcttcggcgatcgtgtgttaagaggtcggatcgtctactcgatcttctatcgccgtgggataatcgcagaaagacgcgatttcccgatgagcgcatcggggcgacaggaggagtgccggaaatgaatgcgagcgggcgcattgcgctcggaatgagcggtggggtggacagcgcggtttctgcggcgctgctcatgcgcgccgggtacgaggtggtgggcgtcacgtgccgctttcgcgacaacgctgccaccgagcgcgcggcggccgatgcggcggccgtgtgctcccagttgggcatccgccacgaggcgccggggtgcgtgggggagttcgaacgctgcgtggtggagccgttcgtctcgtcgtacgcggcgggcctcacgcctagtccgtgcgtgggttgcaacgcgcggtgcaagatgcccgcgctcgtgcgggtagccgacgaactggggtgcgaccgcatcgccacgggccactacgcgcgcattgcccgcctgtccgattcggggcgcttcgtggtgaagcgagccctggatgcgcgcaaggaccaaagctacatgctttcgctgttgagccaggagcagctggcgcgcctcgtgttgccgctgggggccatgacgaaggcggaggtgcgtgtgatcgcggccgatctgggcctggtcgtggccgagaaggccgaaagccaagacaactgcttcatcgagggcgactaccgtccgtttctgcgcgcgcgtggcgtggaagacgcgcctggggacattgtggatcgcatggggaatgtgctcggctgccacgaggggctggcgaactacacggtgggacagcgcaagggcatcggcgtggcaggccccgagccgtactacgtggtggagaagcgcgtcgaaacccgcgaactcgtggtgggttttgccgacgagacgctcatcggctccgtcgtggtgggcgggatgaactggcaggcttatccagcgcttggagaatcgtacggcgcgatggtgaaactacgctaccggagccgtccgtgtgcgtgtatcatagaaccggaagacgaccagcgcgtatcgctcgcgctgcggagtccgcagccaaccacggcgccgggccaatacgccgttctctacgacggcgacaccgtattgggaggcggcatgattgaggaggtaatgcacgcatgaagaagctgttcatcatcggcggcatgggagccggcaagtccacggcccgcaaggcgctggtcgagcaaggtttgccgaacatcgatctcgaccaagtgggccacgacgtccttctgtgggacacggtgaagtccgagctcgtggaaacgttcggcgaggacatcctgggagccgacggcgagatcgaccgccgcgcgctggctgccaaggcgttcgtgagtccggccgagacgcgcaagctcaaccgcatcacgctgccgcgcatcgaagaggcgttcaccgaccgcgtggccgagctggaggctgaaggccacaaggccgtcgtggtggagcattcggtgttcaagaaccgccagacgtcgctcgcttacgacgccgacgtggtgatcgccgtcctcgcgcccatcgacctgcgtatcgagcgtgcggtgaagagcggttgggacgagaccgacgtgcgtcgtcgcatcgcccagcagatcaccgacgcggatcgcatcgaggcgtccgacgtggtgttcaacaacgacggtactcccgaggagatgcgcaacaaggtgctggcctggtggggagagtattccaaggacctgtaggtcctcgcgttcaacctgcggggacgggtcgtgggcgaggggtctgcaactcagacagtcctgctcgcacgaacagcccgctgggctgttcggctcgtgcggaactcgtatcagacccctcgcccacgacccgtccctggtaaagctgcgggcttcggttcttggccggagcctgttttggttgttgggggcgttgtcatcctgagcggaggcgcgaagcgccggagtcgaaggatcccgtgcggcgtcagcggtggccgctaccacaatcccaggacgtgctgcattcccaggctgacggcggcgatggccacccagcagcagaggcccatgaggatgggcttgccgcccgacttcacgagatgcacgatgtcggtgttcaggccgatggcggccatggccatgacgatgaagaacttcgacagcgttttgagcggctcgaacacggccgcgtcgatgccggcggacactgctatcgtggtgatgacggacgcggccaggaacagcaggatgaacacgggcagcgcgcgacgcaggctgaaacctcccagcttgcctgcgggcttcaccacgctgtgcccctgcgcttcgagcgcgatggggtcgcggctttcgcgacgcgccacccaaatgcccagcaccagcgtgatggggatgatggccagcgtgcgggtgagcttcacgatagtggcctggtcgagcgcgttcgagccgggatgcatgccgtcccatgccgcggcggctgccgtcaccgacgaggtgtcgttcacggcggtgccggcgaacaggccgaagccttcgttggtcatgcccagcgcgttgcccagcgatgggaagataagggcggccagcacgttgaacaggaagatgaccgagatggcctgggcaacgtccttgtcgtgcgccttgatgacaggcgcggtggccgcgatggccgaaccgccgcagatggacgagcccacgccgatgagcgtcgagatctccgagggcatgcgcagcactttgtgcagcaaaaacgccacgatcagcgcagtggcgatggttgagccgatgatgggcagcgacatcatgcccacctgggcgatctgcgcgaggttcaacccgaagcccagcagcacgacggcggcctgcaacaccttcttgccggtgaacgcgatgccggtctgcacgcggccgcgcgcgggctgcttccagaacacggcgatggccatgccggccaggatggcgaacacgggcccgccgatgatggggaactgctgcccgatgaaccagcacggcaatgcgagggcgaggcatacagccaggccgggtatgttcttcaaggcgttggtcacggtcgatccttctgctatcgaacgggtgcgcgctccgtatgcgtgagcgacggcgtcagagtataccattgccgtgtggctgtcgcggttatcgaactcgctacaatactgaaaatttacgaacatatgtttgtaaatctgtgatatgatgctagcatcataaaagaaccagtgcaagtgcttgccggtctgcgtgctcggccggatgcccatagaggcggcggatgttccgcgccgcccgtaccatgcttgcaagatccgcaggatcctctcagatcatcggaacagataaagagaggtgtatgccgtatgtctgatcgtgcgacgatcaacgcgcaaggtatcgaagtgacgttttgtaaaggcgacgcctatgctgattacgtttcgcttaccgatattgcgcgctataaaagccccacgccgaaagatgtgataaagaattggatgaggactcacgatgttatcgaatatctgggtctttgggaaaccctgtacaatccaagctttaaaggggtcgaattcgactcctttaaagctcgttcgggcagcaatttgaaccgggcggcgcgagagcagctctcgctgctgcttcggtcgagcgcagccgacgggttggagggcggagagctaggctcggggcgtgcgttgccctccgcttcgtaaccgtttactaacgaacatctgttcatgttacagatgctgtgatacactggatctcctgcgaagttttacgttgcgcggctccgacgcgtcggtgctccgctgttgttcggaaggagcagcatggctcatctttccaatatcgaaggcatcgagatggagggcaagctgcccgaggttcgtcttgcctccacgccgttcaaagcggtgtctccgtacgagccggcgggcgatcagccgcaggccatcgagaagctggcgaccggcgtcaaggagggcttgcgctatcagaacctgctgggcgtcaccggttccggcaagacgttcaccatggcaaaggtcatcgaggccgtgcagaagcccacgctggtcatggctccgaacaagacgctggcggcgcagctggccagcgagctgaaggagttctttcccgacaacgccgtggtgtacttcgtgtcgtactacgattactaccagcccgaggcgtacgtgccctcgtcggacacgttcatcgagaaggacgcgtccatcaacgaagaggtggagaagctgcgccatgcggccacgtcggctttgctgtcgcggcgcgactgcatcgtggtggcgtcggtgtcgtgcatctacggcattggcagcccgatggactacgccggcatggccgtgttcgtggacaagcagaaggacatggatcgcgaccaggtcatccatgagctcatcgatatccagtacgaccgcaacgactacgagcagaagcgcggcacgttccgcgtgcgcggcgatgcgctcgatgtgttcccgccttacgccgaccatccgatccgcatcgagttctggggcgacgagatcgagtccatcaccgagatcgacaacgtgacgggcgaagtgctgagcgagttcgaggctctgcctatctggccggcctcccactacgtgaccgcgcgtccgaagatggatcgcgcgctgggcaccatccgcgacgaactgcgcgagcgcttgcagcagttcaaggaggaaggcaagctgctggaggcgcagcgcctcgagatgcgcgtgaactacgacctcgagatgctggagacgatgaacttctgctcgggcatcgagaattactcgcgccacatggacggacgcgagccgggagagccgccctacacgctgatcgactatttcccgaaagacttcttctgcatcatcgacgagagccacgtgacggttccgcagatccgcggcatgcacgagggcgatcgctcgcgcaagatcacattggccgagcacggcttccgtctgcccagctgcctggacaaccgtccgctgcgcttcgacgagttcgaggatcgcatcccgcagttcgtgtacgtgtcggccacgccgggcgactacgagcagaaggtgtcgcagcagcaggtggagcagattatccgccccaccggcctgctggatcccgagatcatcgtgcgcggctcggcatcgcagatcgacgacatcatcgacgagtcgaaggagcgcgctgcgcgcgatgagcgcgtgctcatcaccacgctgacgaagaagatggccgaggacttgacggatcacctgctggaccagggagtgaaggctcgctacatgcactccgacatcgccacgctcgagcgcgtcgagatcctgcgcgatctgcgccgcggcgagttcgacgtgctggtgggcatcaaccttttgcgcgagggcctggacctgccggaggtatcgctcgttgccatcttggatgccgacaaggaaggtttcctgcgcaaccaccgctcgctcatccagaccatcgggcgtgcggcgcgaaacgtttcgggtcaagtgatcatgtacgccgacaagatgacggattccatggcgctggccatcgatgagacgaagcgccgccgcgccatccagatgaagtataacgaggagcacggcatcgagccgcagaccatccgtaaggccatcaacgacatcatgagctacgtcaccgacgagatgggcggcaccacggccgagcaggtgaacaaggagcttgccgagctgtcgcgcgaagaggtgctgcgcatcatccagtcgatggaggacgacatggcctccgcgtcccaaagcatggacttcgaggaagccgcccgcctgcgcgaccaggtggtcaagctgcgcgtccaggtggagggcggcagcgaggacgacgtgttgaaggacctcaagaagaacgcccgcaaaggtagcgcgtacggcaatcgaaagaacgccgcatacggcagcgcccgaaggtcgtgaggttgcccgagaggccgctcgtcgcgtgaagcgcgccgctcgacgcgatcgcttcgggtggaaaagccgctggccgaacacgtctttgagttctcagggcgcgatagcatgcctgcatgcgcgccacggtaccatacggggcaggctgtgcaggcgaatcgaaggagaaagcatggacatgggcttgaaggacaaggtggtgctgatcaccggcggtggcggcggtatcgctcggggtatcgagcgcgcattcgccaccgagggtgcgaagttcatcctcaccgacctgttccccggcggtctggaagcggcgaaggaggagcttgagcgcgatttcggctccgaagtgttcacgattctcgcgaacggatcggtggaagaggaggtgcgtgcggcggtcgaagcgggcgccgagcacttcggcgggcgcatcgacgtcctgatcaacaacgcgcaggcgtcggcgtcgggattgacgctggtgcagcattcggaggaggacttcgacctggcggttcgatccggcctgtacgcgacgttcttctacatgaagcatgcctacccttacctgaaggagacggcgggatccgtcatcaacttcgcttccggcgcgggcatcggcggcaatccaggacagagctcctacgctgcggcgaaagagggcatccgaggcatgagccgcgtggccgcatcggagtggggccccgacaacatcaacgtgaacatcgtatgccctatcgtcatgacgaaggcgctcgaggaatggcgcgagcgcgagcccgagatgtacgagaagaacgtgaaggcgatcccgctcggacgcttcggcgacgcggagaaggacgtaggacgcgtgtgcgtgttcctggccagtcccgatgcctcgttcgtaacgggcgacaccatcatggtgcagggcggttccggcatgaagccgtaaagctgcaccaaacgccaaccctccctaactcggcgaaaacgggggctgctcgacagtgtcggacagcccccgtttcgatgtctcgagcaaaagagagccgctagccctcttccgagactgttccgatctccgcgttcgcctcggccgcgctgtcgcgcaggacgtgcggctcgtcatgatcgagggcgcgcacgctcttgaacaggtacacggtcagtcccagcgcaatgcatacgaggccgtccgccacgaaaaacgctgctacgcccatagcttcggcggccacgccgccgatggcgatgcccacgggggaggccagtcccatggcggccatggccaggcccagcgcgcggcccgtcttctcctcgggcacgttgcgctggatgagcgtgatcagcggtccgttgaaccaggagcatgccagcgccatgacggcgcacaacgcaacgaacgcccagaacatggtgggggcgaggaatccgcacgccgtggtggtgacacccacgatgagggaggccaccgcgatgagtccggccaggcgcttgccgccgccccaggccatgagcacgatggaccccgcgatcatccctacgccgaacgcggcttccacgacggacgccatgtagccgtcaccgccgaagtggtcgtacgtcataagcgggaagatggcgcccagcggggcgaacgccatcatgccgatggtgatgccggcgatgaggatgacgagcccgcgggttgccgacagcgctttccagccgtcgcgaaggttcgccagcacgtgctggttctcggcggtctcatcggcgacggtggggatcttcgccagcgcaagccccgccacggccacgagtgctccggcgaagtcgaggaacatcacggagtggaacccgatggtggtgtacaggaagatgccgaacgcgggggcgccgatggacgcgacggacatgagcagctggtcgagcgtgttgatgcgcagcaggtgcttctcgggcacgagcagcggcatggcggccatcatggcggggccgtggaaggcctgtccgatgctgcgcacgatgacgaggatcatgagcagcggaaacgatacctgcccgaacaggatgacgatgcccagccccagcgacacgatgcccaccgagaggtcggccacgatcatgaccgtcttgcggttgtgcttgtcggcgatgacgccgccgaagggtgacagcagtccttgcggcagatacgcgcagatggcggccgcggccagcatgatggcgctgcccgtagtctcggtgatgtaccacaccacggcgtatcccgcggcgtagctggtgatcatagaagcggcttgtccgccccagatggtggcgatgatcgcaagccagcgcttcggcagctcgcgaccggctgcgctcaggggcgcggtcgatgcagtcatggatagctcctatagaacgagatggtcggatgaacgtcagtgtgaggtagcgaacgcggttgcgctaccaattctagatggaagaaggccgccgaagcggcaactatgcgttgcgcgaacgcgcggcgcagggatgaatcgcaaatcgactgagcgatttagcggaaaaggcgaccagccatcgagcatgctcctcatgatttcgagcgaaaagtaacggccagtgtatcacgaaccgatgaacgtgccaagggcgggttttacttcgcgggcggcagcagaaggttgaggtcgacggcggtgccgatgccggccacggaaccgccgttggtgtactgccagatggcgaagtcgaactgcgcgtgcggctcggcagcgtcgtactcggcgaaccagacgggacgcccgcccagatctgcgcggtcgtagcgcgccatatcgccgctgttgccgtagatcatcgtctcgtagccgccctgctcgaggcgttcgcagaacgcccgcgcgcacgcggtgagcgtttcgcggtccatgttgttcgcacgacccgcgccgtcggcgacgggctcgtggtcgtacgccacgggcagcgccaggtaacggccggccagcagccgcagcacgaactcggcttcttcgcgcgcctcttcgacgctgacggcttgcgagaagaagtacgcgcccacatcgaggcccgcgctcgtcgcattgtcgatattctcggcgtatcgggtatcggcgtacagcgcgccctcggtgtagccgcggttgcccacgcgcacgaaggcgaagtccacgccgtcgctcgccacagcgctccagtcgatggcgccttgatggtcggacacgtccacgcctaactgggagcgcacctcgccgttctcgcggaaagccaggcggtcgcccgaacgttcgagtccgctccaatcgtaggggctcacgtatgcctgcgccgcgggctccgctgcatcttcggggccgcatgccgccgtgaagccgagcgatcccagcagggcgacggcggtcagggcggctgcaacggtggttttgaatcgtttcatgcggcttatcctaccaaagcccccgtcgtccgtgcgcgcgaacccgtcggcgctacgacgactacagaacctgcatgcaaggcgtgcaccgctctgacgcggtgttcggcgcgagcggatcgatgggacggcgcgtcatgcggccagcgcgcgcaggtttcccagaatgtgctgtgctgcgtcctgcccgaggtagtcgtaggatacgagcttccgcaacacttcctgctggcgctcgcgcgcgaggccagggttctgagacagcgcgtacacgctcggcgcgttcgggatgccggccagcagcgtgcattcgtcggcatcgagcgcgctgggggctttgccgaaataaccccagctcgcactgccgatgccctcgtagccgtcgccgaagtagatggagttcacgtatagctccaggatagtgcgcttcgagaagtgctgctccatcgtcagcgccatgaacacttcggctatcttgcgctcgacggtctgctcttgggtgaagtactggttcttcgccagctgctgggtgatggtgctgccgccttccacgatggcgcccgctttgaggtcgttcacgagggcgcgcgccgtggcgatggcatcgaagccgggatgggcgtagaaccgatgatcctccacggccacgacggcctgcaggtacaggtccggcagctcgtcgatgggcgtgaacgactcgctgctctggatggatgcggccatctcgtcgaggccggcttcctcgatcgcttcgcggtacaggttgaacccgcgtgcaagaaagtacacttccacgagcacgacgaggatgagcgccgccagggcgaggcgcccgatgaacgtgatggctggatgcgccgtcgatgcacgatgcgccgttcctttcatggtttccacctttctgtagaggaaaactccccactacgttataccaagcggttcttaacgccgccttaccgaccgcttgccccatccttacattcctgcaagaaaggcgtgttctatcaggtaaacgatgggctatacttttgaaaacgacacgaacgagaagggtgcggccgtcgcgtgcggcaaggccggtaacaccatcgaaggacggtgcgacgaacatgatgatatcgacacggggacgctatgcgttgcggctcatgatcgacatcgcacgacaaggggaagccggcgcgctggtcaccatgcggcaagcggccgagcgggaggatctgtccgtcaaatacctcgaacagctgggcggggcgctggtgaaggcgggcgttctcaaaagcgtgcgcggcgtgagcggcgggtatctgttggcgcgtccggctgatcagatcactgcgggagacgtcttgcgcgccaccgagggcagctgcgcgccggtgtcatgcctcgaagacggcgcggaggcgtgtccgcgccgcgatcagtgcgtggccatcaatttctggcgtgggctcgaccaggccatcgaggattacgtggacaacgtgacgctggccgatctggttcagatgggctagaggtcgcgcgtcgcgtacccgcgaaccgccgcgcgctccgatacgacgtacaaggcgagcgccgccgccgtgacgcatcctcccacgacgagcgcgccgcccagcgactgcgcggcgacgacgatccggcccacgaggggaagaaacgcgtcgaagttcatggagcggaatatgtagatccagcccatgagggcgagcatgaaggcgaaggggatgtagctggcgagcttgcggtggctgtcggcgaacatgaacggcagcagcacgctgaacatggcgatggtgagggcgaacgtgccggccgcgaacgatacgacgcccgcagcgtcgaagcctacggcgaaatggcggacaaggggaagccccggcacaacggcgttgacgatgcaagcggtcgtatacgctgcgacgccgagagcgacgcatccggcgacgacgacggcgatgcttgcgtagcgtcccgccactacgtttgctcgcgaaagcggcaaagcctggcgaaaggcgacccaatcgcgccgctggtcgcgcagcagcatgggcatgagcaccatgtgggacatggggaagccggtgagcaggatgatgggagtcgcgttccccgctgccaggcatatgcccgttgcaaggagcgcccacagcgccacgttcttcggcagcgatttcgccaaagcgaggaaatcggcaagcatcatggtcttcatggggcgctccttttccgtccgctagagctcgcgcttctggtacagcttggtggagattacggctgagatcgcgtagacggcggccgtgatcgcaagaactccggcagcgatggcgatggtgcccgcgggcgactccaacaggttcagcacgttcgcgacgaactcgggcggcggcccgttgccgtcgagctggaacgcgaagaacacgccgattatgatgagcagcggcaggtagcggacgcccttcgtcatgccgaaccgcgagaacaagggcatcgtgacggacagcatgaccaagatgatggccaatccggcgacggacgcgaagagcatggtctgccacgagaagttccccatgaggtcggctagctggggaacgccgggggcgatctgcgcgacggcgaccatcacgagcgtcaccagcaggcctgccgcgatgcccagcagcgccaacagcgcgaagctgacgtagcggcctgcgatcacgttcgatcgcgacatgggcaaagccagacggaactgctgccagttggcgcgttcgtcaagtgcgaggatggtgatggtcagcgagaaggggatcatcacgcccaccatgggagcggcgacgtagaggttgcctatcatgacggttatgaagatgcccacggcgatggagacgcccagctgttgcagcaggtatttcttcgcgatcagaagatcggacatgatcatggctttcatcggacctctcctttcagcatcatgcccatgtagacatcgatatcggccttgtcgacggcgatgttcttgaagttctcggcgaacgcgaaacggtcgggagccagtacgtcgatgccgtaggggtggcgcatgctgcgcagctcgccgggggcgaagaagccgctctcggcgatgcgctcgtagtcggtcgcgcggcagtgcgcgatgccggccagatcggtgatcgtgtccttctcgacggcgaacacgatgcgaccggcgtcgatgcacacaatgtaatcggcgatcttctcgaggtcgctcgtgatgtggctggacatgaggatgccgtggcgctcatcgcgcatgtagccgcgcaggatgtcgagcgcttcctcgcgggcgagcgggtcgagcccggcggtggcctcgtcgaggatcagcaggtcggggtcgtgtgccagcgcgcaagccagcgacagcttcatgctcatgccgcgggagaggtccttcaccgtcttgctcttaggcagctggaactgtgccaggcgctgctcgaagtcggcagggctccaggagtcgtagctgtacgacatgagcttgcccaccgaggcgacggtcatctcctcggggaacgagcaggtgtcgaacaccacgcccgtgcgttgcttggcgtccttgatcgccttgctgccggcatgttcgccgacgttttggccgagcagctcgatggagccggcatcggggtatatgaggccgaggatggccttgatggtggtcgtcttgccggcgccgttcgagccgatgaagccgacgacgcttccggcgggcacggtgaggtcgacgtttcggaggtcgaagccgtcatagtgcttcgacaagctgcgtatgcggaggaggtcgttcatcagtcgtcactttctgcgatgaggtcgagcatgtcatggagctccgggatgccgacgttcgcgccgcgcgcttcgtcgacggcctggacgagcagctcctcgatgtgccgaaggcgctcctcgcgaagaagctcgaggttgccgccggccacgaagctgcccttgccgggcaccgtctcgatgaagccttggagctccagctcggcgtacgcgcgcttggtcgtgatgacgctgatgcgcaggtcgccggccagtgctcggatggagggcagctgctgcccttcgcccagctcacccgtcaggatgagggccttcatctgcgagacgatctggtcgtagatgggcttgtcgctcgcattcgagatgatgatgtccaactcaggctccctttcgtggtttcgtgcgcgagcgccggggcgtccccctgcgctcgggtggcgcgtcgcggcgtcccgcttcgcgccgggagaggccaagcacgttcctcgtcccctccggccgggcatcgtccactccgtaacgtgtagagtgtatatacccgatatgcacactataaacaatagatacggaagcgtcaagacagcgcatgcgatcaactgccgtcattgacgtaatacggtattgcgcatctatgctcgatgaagcgaaaggagcgtgtcatggttgccgtcatcgacaacgaagagcttccgaaagctttcccctcgcttgaagacctaaggagcgggcatcgtgcattgacgcctgagcgaaaggcggaactgcgggagcttatccgttcgacgacgcttgaggcgcccgacggctggggagagcggtcgttcaaggaattgcttgaacgaggctagggaggagcgttatgcgcgcttgggagctttcgcgaggacggggttgacgtagcggccgcgacgctcggtcttcgcaccgtactggatggcgttcacggggcagcggtgcaggcaggcgaggcactgcgtgcagcccagctcggcccagcggggcgcgccttcgatgatcgtgatggtgttggtggggcagaggtcggcgcactggccgcagctgatgcaggtgggcagcgcgaagaactccgaggtggatcgcggcttctcgtccttttcggtgaacttggacagcacgatgcctaggggattgcggtgctcggcgcgcacgtgctcgcgggctgcgatgcgatttgccgtctcgcgcgcggcaagttccgcgccggcaagcaggcgcttgcgcttctcgccttgggcgggcgcgtacaggtatgtgcagttgcccaccgatttcacgctgaacgaggcgtcgaggttgatgccctgcgcgtccaacaggcgcttgccgaagacgcgcgccgtgctgcccacgaacgcgccgcagctgatcacggcgaagcaatagtcgggcgtgaaggtttccttgttgcccgtgcggaagcgggctcgcttgaggaacgcatcgatgatgggcggcgtggtgtagttgtagacggggaagacgaagcccagctgctcgccttgcgcgagcgtgaagtcgaagtccttgtacttgtaggccgcgccgatgtcgacgagcaggtcgtccgttgcgcgcgcgatggtctgcgccgccgcgagcgaattgccggtgccggtgaagtagaagatcatgagccgcctttccgtctgtatgccttcagtataccaagccgagcctgcgcgaacgatgacccttttgcaaccgaaggcggttacgatgtttcacgtgaaacatttgtacgtttgatcgacgtgcgcgtctgcttcgcctcggacgtccttcgccgtttccggcaggatcgaagcgagcgaatgtttcacttgagacattccgccgccgaggcatgcggcgcccgttcgcttcgctttgcggctgcttgaggccgctctggtatgatgagcgggatacgaaggctgcaacgcgaaggagaaacccatggcggacgtgctgttcatcgaatatccgaagtgctccacttgcaagaaggctaaggcgtggctcgacgcgcacgatgtggcgtacgccgaccgccacatcgtggaggacaacccgacgtccgacgagctggccgcttggcatgcgaaaagcggactgccgctgcgccgtttcttcaacaccggcggcatgctgtaccgcgagcgcaacgtaaaggccctgctggatgccggcatgagcgacgcggacgcctacgcgctgttggccgagaacggcatgatggtgaagcgcccgctggtggtgggcgacgacttcgtgctggtcggcttcaaagaggtcgagtgggagcgggcgctgctctagcgcgacagcgcgccggagcatcgtcgcatcgtcgcgctagagcgcgtcggtgtcgagccacagcgtgaacggaccgtcgttggtcaggctcacgtccatgtaagcgccgaagcgccccgtttccacgcgaggcacgtcgcggcgcgcgcgttcgacgaaccattcgtacagccggttcgcctcgtcgggcgcgcccgcctcggtgaacgaggggcggttgcctcgtctgcagttcgcgaacagggtgaactgcgacacgaccagcacttcgccgcccacgtcggctagcgacaggttcgtcttgccctcggcgtcctcgaagatgcgcaggcgcgcgatcttgctccagaggcgttcggcctgctcctcgctgtcgtcgtgacccacgcctagcaggatgagcagcccgcgcccgatgctgcccgccgtcgcgccgtcgatatctacccgcgcgttcgacacgcgctgaaccaccgctcgcatagaagcctcctcgcttgcagggcgcttgcgcccgttggattctctcgtttcagtataacggggtttacagcggggtcggacgggcgtataacaagctgattcgaatgcggcgcccgcgccgaggcatgtagggaaggaacgcttatgagctacgcgatcgtgtacgacagccgcaccgggaacactgaggcattggcgcgggcggtggccgccgcgctgccgagcgaagggcgccttgcgttcggtcgggtggacgaggtggatcgcgccgccgtcgcgcaggccgaccgcgtgtacgcagggttctggacgaaccgtggcgattgcggcgacgagttggccgaggttctggcctcgctcgcggacaaggacgtgttcctgttcgggacggccgggttcggagccgacgagacgtacttcgcgggcgtcatggcgcgcgtggcggtgcatctgcccgaatcggcgcggatcgtgggcacgttcatgtgccagggccgcatgcccgccagcgttcgcgcccgctacgcgcaaaccgccgaggctaagcccgagcaggctgcgcgcatgcatcagctcatcgagaacttcgacgaagcggcgagccatcccgatgacgatgatctcgcgcgtttgcgcgaagctgtccaagcggcgagctagcatggcgaagccggcgagccttcccggcatcggcttccatgccgcgttgcggctgtccgatgcgggcgtcgtagcgcgttagccctcggcgggttcctccaagcgcgacctgagcagctggagcccgccgaccacggcgccgccgatgaggaagaacacgatgctgaacgtgtcgaggctcatggccggctgcggctcgctcagcgtgagcggcccttgcgtgatggagaacagcgaccccagcatcatgccgatgatggcgtagatggtctgcgagcggaagcgctcgaggcacattctgatgagtcggacgaacagaagcatgccgcatgcgatgcccgccgcgaacaccatcagaataggcaggtaggacagatcgagccccatcgtcgcgcgcaccgcacccatgatgggcacgtacagcccgaagatcagcagcagcgtggagcccgatatgcccggcagcaccattgcggagatggccgccatcgccgccaggaacacgtacgccaccaggccgaggtcgaggctcttcgccgcaacgtcgatgccctctccgctcacggggctcagcagcgtcactgccacgacgaatgcgacgcccacgacggcgaacgcgaggtacggcagccgtttacgcaatgcgtccagctcctcgcgcacgacgatggggatggcgaacacgatgaatcccatgaacagcgagctgacctcgtagatgtgcgtatcgaagaaactggtcagcacgagcgccgacagcccgaacccgatcgcccaacctgcgcccagcttcagcaggaagcgcacggctgcgaagcgcgcagccctcgcgccgtggaacaggtcgtccagcgagccgatgaaccggtcgtaaaagcccagcaggaaggcgacggtgccgcccgacaccccgggcacgctgtcggccagggccatgcagaacccgcggacggagttgacgatgagttcggtaaagcccttcacggatgactccctttcggtttccaatgtgaacagcatggcgtattcgcaggggaatcctcgagtcgtacaccgatcgatggaggatattcagaccgcttaagattcggtaaagcccgtgtaaagggaaggtaaagccgcagcgttttcgacgaatcgggtctgatgtgcaagacgaccaaaaaaagcccggggccgtaagcggcctcgggcttcgcggtgatcgcaatcgtgcgcgctctagatatggatgttcccgaacgtgatgaccgagtagataaggccggcgatgccgagcgccagcaccacggccaggatgaccttgtccgaccgcttctcgaacagcttcgcctgtcggtcgtgctggcgcacgcccacgatgtacagcggcaggccgatggcgtacacgatgcaggccaccatgaggtagttcaggccggccgcgtagatcagccacagtccgtacagcgaaccggccgcgcccgtgaacacggccatgccgcggctggcgaagatgccggacgggtactccttcttgacggcgatcttgaacaggaacagcgtgcagaagaagtagcacggaagcgccatgacgctggtgatgctgatcatcgtggtccaggcgttgttgcctatgaagaacgagatgatgagcaccacctgcacgacgatagtggtccacagaagggatgtggacggcgagccgttcttgttctccttcacgaacattttggggaagatgccgcttttggaggcggccagcggcatctcgcccagcatgagcatccagacgagccaggagctcagcaccgagacgatcacgccggcgttcaccatgatctcgccccattttccgaacgacttcagcatgatggccgccatcgacgggtcggccatgctgccgacttccgcttgcgagtacacgccgaggggcagaagcgacacgacgatgtagagcgccagcgtgacgaggaagccgatggtggttgctttgcgcactgcggcctgcgatttcgccttgcccgacacgaccacggcgccctcgatgcccaggaacagccacagcgtgaccagcatcgtggacgaaacctgaggcatgacgttgctgaagtccaaggtcaatgccacgccgtctttcatgccccagaagccttccatgaacaccgagaacttgaacacggtggccacggccaggatgaagatgaacacgggcagcagcttgccgatggtgccgatgatgttcaggaagctggtggacttcgcgccgcgcagggccagcaggtacatgatccacgtgatgatggagccgccgatgatggacggaatgttattgccgcccgtgaagtcgggcacgaagtagttcagcgtggccatgacgagcactgagtaggcaacaagcgcgaagcagttgcaaatccagtagccgtacgccacgaagaagccgatcagcttgccgaagcctttctcggcgtacgtgtacaggccgttcgtgagctcgggtcgcgcggccgacaggatgcggaacgtgttcgcgatgaaccagatgccgatgccggtgacgacccaggcgatgatgatggctcctgcggaggcgtctgcggccatgttctgggggaggttgtagatgcctccgccgatcatggcgctgatgacgatgcctaccaggccgatcaggccaacttttttcgagctgtcctgggccgatgatccgccggaaccggaagcggttttgtctgccatgtttccagtccttgtctaaacgtgatcgagccgcccgggggttgcctggacggctcgatcagggggataccgtcggttacgcgatgtccgtgagcggctcgaagtccatttgcttgagccagtcggacaggtgcaggttgttgagcgaggcgaatccggtagcgggcacggcgttgcgggccagcgtgacgtagggacccaccgtgatggcgttgccgatctcgcccggcttcatcatgcggtgagcgaagcccacgtaggtgcggtcgaacagcacgttctggtcgcggccgcactcgacgacggaccagacgatagctttgcgatgctgctcgaggaacgcgatcatgtcctcttcgttgtcgttctcggtccacacgccggcatcctcgatgaacaggtcggccgcgaagtcgcgatcggcggaaagggagatggcgatgaaggaccacacgccgtagccttcgccctccttgagcgggcggtcggtcttcgggcggtaggcgacgacgcccttgttcgcgcagatggtgtgcgcgcccggaatgggatggtagcggcggttctgctcggtgccgaacagctccacgcctgcgctcagcagcggggcggcgtcgtacacttccagctcgcggccgttccactgcttctcggtgaacagcggcttgctcttgccgttgtcgaccgagtcgtggcgggcgaggtcgtagccccacacctgtccggccatgccgcagaacgacgaggcggtcagcatgttgatctggccgacgtacgcatcggcggcctcggccttgtcgtacgtgacgatgcggtcgaccagctcgtcgttggtcttctccaccgtgcctgccgaaaccttcagcacggacacgtagccgttgccgtaggcgccgggcatgccgtatccgtcgcagtagtcgtcgtacggactgatggccgtcttgtcgatatgcggcgcgcgcatggttgcatggtggtttgcctcgcgagcgatagtgcggttgcgtcgctcctcaacgttcttcatggatggaactcctttcgtatgcgaacgatttcagcgccgattgtaggacccctcgtgcgtgtggaatttcgcaggggggtttcgatggcgagccgtgctttgcccgacgatgcgccgtcacgaagatgaaaggaaggtgttgccgggattcgtcgcatctcttgacggtgctgttgacataccgtatattacaaacgttatataacggttgtaatatacgggagggtgaggatgccggagcagaaagtggggcgcgagacggtgctcgatgctgcactgggcttgctgcgagagaggggagaaacggcgctgagcgcacggacggtggccgagcgggcgggctgctcggtgcagccgatctacagcttgttcggcgacatgcgaggactcgtgcacgcactgtacgaccatgcgcgcgcgtgggtcgcggcgtacaaccgcgagcatgtggacgacggccgtaatgcgttcgaggcgaatgggttgtcgcatctgcgccttgcgcgcacggagcgtcatttgttccaattcctgtacctatctccgcacatggaggcgacgagcttcgcggaagtgtacgagagcgtggccatcaacggcgtgcagcaatgcatcgaggagctggggcatctgtcgcccgcggcggcgcgcgcgctgtacctgcacatgatcgtgtacacccacggtatggcggccatgctggttgcgggcgcgcaattttccgacgaggaactgggcgaacgcttgaacgaggccttcacgggtctgctgacgttggtgagatgagggaaaccatggaggagtcggagagaagttgtgcgagcgatgcttcacgtgaagcatcgggtgtttcagaacgtatgttgcatgatgccgcctcggccgagacgcgagcgggggagccgaatggtccgatgcgaggcgggcgaggacgtgtagccgcgcggtcggccgacgaggtgcgcgggtcggcagcgcgctcggccgacgaggtacgtgcgcggcgcgaacggggaaggaagcggcagaacgcgcggaggctggccctgctcgtgtcgtttctgctgttcccggtcatcatcttctacttctcgccggcgctgatcatcgagggcgccttggaaggggcggtggctgccagcatgctcgtgttctgcctgcagttcttgtcggctatcgtgctgcgtcgcgcgtggtgcgggtggttgtgcccggcgggcggcctgcaggagcttgaggcgaccgccgtaggcaagcccgcgaaactggggtggagggcgcgcgtcaagtatgtgatctgggtgccgtgggtgtgctccatcgtagcgtgcgcatggatcgccggtggtttcacgacggtcgacccgttgtacggcataccgggcggcgtgtctatgaacagccctttgggattgcctatctatttcggcatcgtggcgctgttcttcgttcccaatctgctcttggggcgtcgcgccatgtgccactgcatctgctggatggcgccgttcatggtattgggcgagaaactgggttcggcgctgcgggttccgcaactgcgcatcgaggccgatccgaatggctgcatcggctgcgggaagtgcgaccgcgcgtgtccgatgagcctgccggtgcaagacctcctggccggcggtgccgtcgccgacgccgaatgcatccagtgcgccgcctgtgccgacgtatgtcccaagggcgtgctgcgtctgcgcatgggccgcatgcggtaagcgagcccgaatcggaatgtatcacgtgaaacattagtactgtttgtccacttcgatcagcgcatgcccttctttcgaataacgtctggcgaggggagcgccgcgcaacctcaatccggtcgaaaaaaattgcacgcgtctgttgaccctcacgtaacgtgagggtgtacgctggttgcacgcaggaaaggaggcgcgcatggaacgggaacggacgggcgtcgggtacacggtgcacgagttggccgagctgtcgggatgcacggtgcgcacgctgcatcattacgacgatctggggctggtgcccgcgcagcgcgccaacaacgggtaccggcgctacggcgcggccgaagtcgaccggctgcatcaggtgctgctgtaccgggaatgcggcatgccgcttgctgccatcgggcgtttgctggacgaccccgcgttcgatgcgcgcgacgcgctggccggccacctgcgcgagctgcatgcgcgcaagcggcgattggacggattgatcgcgagcgtggagaagacgctcgcctgtatggaaggttctgcaaccatggaagacgaagagaagttcgaggcgttcaagcaaggcctcgtggacgagaacgagcagcgctacggcaaggaggtgcgcgagcgttggggcgacgatgcggccgatgcgagcaacgcgaagctcatgggcatgagcgtcgagcagtaccaccgaacgcagaagctggagcagggcgtcaaagatgcgctgctggcggcgatggctgcgggcgacccgacgggcgaggacgcgcaccgcgcggccgacctgcaccgccaatggctgtgcgaattctggaaggacggaacgtactcaaaggccgcgcacctcggcctggccgagatgtacgtggccgacgatcgcttcaaggcctactacgaagctgtcgcccccggcgctgcggaattcctccgcgatgccatcaaggcgtactgcgcataggaatgtgcgccccgccgcctttcgcggcggcggggcgccatcttcgctcgcaaaacacgcctcggctcccaacgcgtgttttacgagcgaagatgcttagttttgccggagcgtgattattcttcttcgcttgcgagcaggcaggttgcttctaaggcttgcgacagctcctcctcggttggcaggcagagcacgtactgcgatgcgaagattcccttcttatcggcgaggacggaatacttggccaccgcttcgttgcgattcgcgcagaggacgatgcctatggtgggattgtcgtcaggctgggtgcactggtcgtcgaataggcgaacgtagaagtccatctgcccgacatcctggggcgtgagcttcccggttttcaggtcgatcaggacgaagcatttgaggatgtagtggtagaacacgaggtcgatgtagtagtggtcgccatcggcgctgactcgctgctggcgcgcgacgaacgagaacccttttcccaactccaatagaaattgctggagtttgtccatgagcgcttgctctaaatccgtttccaggtagttcgagttgccacccagatcgaggaagtcgagtacgtaagggtctttgaggatgccgtcggctttagttggcggctcgaggttctggatctcttgtcgaacctcgtcttttccttctgcgcgagtggccaaaagtcgttcgtagtagaacgagtggatctgccggtcgagctgccgcaccgtccagcgctcttcgacggcggagcgcacgtagaagtcgcgacggacgggatcatctatgcgtatgatcaggcgataatgcgaccagctcaattcggcacacaatgtgtgccgaattggatatgcaagatacagctggcgcatggcgcgaaggtttcgttccgtgaaccccttcccgaattcggctgtcagccgctcggacaggtattccatcagatgctggccgtattctgcgcggtcgccctgcgcttcgacgatttgccggccgatctcccaatatgcggaaaccattgcgtcgttgattgccgccgccgctttcgtgcgcgcggtttcgagtgcggcgcgaaccgattgatagacggcttcgtccggggaaggatcgtagatctgttccaaggacagcctcctttcgagaaggcggctgtcctttacgggaaagttagggtagcacccgaccagtgaatacgatgtgcttcattatatagaacatcagttcgtttatcaagcctcttcttctgtcagatccagacggttgatgcggtcggccaggtcggctcctcgttcgtagaacagaaggtcctcgttgtgggcgaagtagcgctcgcagccgtggtcgttgatgaaggccatgccatagcggttcaccgataagtcggtgaccaacagcagcatctcctggccgttgccgaacgcgtcctccacgaagcggaaggcgttgtccagcgcgctcgacacggccgcgatgcgcgcgtccagcgcgtcgaccatttccccgaacaaagttttcacctgcgagaacggaaccccgccgcccgcagcgtcgcaacgcagcgcgcggtcgatcagcgcaagcgcgcgctggtaggccacgtacttctcgtccgacagcaggctcgctttgcgctcggtgtccaagcgcgcttggagcgaggcagcttcttcgcgcaggaggggcagcgcgttcgcgtcgtcgatcgctatcgccgcaggggatccttcgactgcgctcgctccgttcgcttcgctcaggatggcatcccgcatcgccgccagccgtccgtgcgcgaactccaccgcgcgctcttccatcacggcgtcgcgcagccgtccgcccaaggcgtccgtgatcagccccatgagcgacacccgttcgtcgaacgcggcctcgcgggcgcgctcgaccacgctctgctcggcggagccttccagtatgcgctcgatctgatagtcggcgcggtacttcgtgaacaggtcgtagtataccgagaagcgcttcgcgatctcggcgttctgcacgtactgcccgatcagcagctcgtccacggggacgccttgctcctcgtacagcttcatcatggcggagaggtcgtcccagccgcgcgccgtgacgaacgacttgccgtccacggtggtctccacgcggtagaagtggtcgcgctcgatatcgaggtacgtgagcacggcggggtgcacgcccgtctccacggcgaagtcgcgccaggcggcgaaatcgggctccacgtcgatgcgcttgaggcggtcccaggtggcgatgtcgaaatcgtgcgccgtgcggttgtactcgggcgggttgccggccgtaaccacgatccacccgtcgggcacgcggtggcgtccgaagatcttgtactgcaaaaactgcagcatcgcgggcgtcagcgtttccgacacgcagttgatctcgtcgaggaacaggatgccctcgcgcttgccggtggcctccatcgcgtcgtacacggcggcgatgatctcgctcatcgtgtattcggacacgtcgtattccacgccgtcgtacgtcttcttcgcgatgaacggcaagccgagcgcgctttggcgcgtgtggtgcgtcatcgaatacgacacgaaccccacgtcgaggtcctgggcgatctgctccatgatggccgtcttcccgatgccgggcgcgcccagcaggaacacggggcgctgccgttcggtgggcagacggtagttgccgaactcgtccttcgaaaagtacgccagcatggcgtttttgatctgctgctttgcctgacggatgtccatgattgctctccttgcgagttgatgtcctaaaaggggacaggcaccttttaggacatttcttccaatacgacggtttcgtcgagctccactttcatggcccacgcagggacgttcggactcgcggcggccgaggcgtcgtcgacgaagacgaacgcggtgtcgtaatcgggcttgcgggcgggataggttccctgcccgtcggtgaagtagatgaggccgcccaggttcacgaggtcgccgcgctccacggcgtcgtccacgtaggcgaacacggggcggaagtccgtgccgcccaatcctttgatctcgaggccgtccaggtagtcgtccagatcgcgcaggttcgagatgcgcgcgacgtccgtgatggcggcgtcgcattgcacgatgagcacgttcatgtcggcgaagaagctggtctcttggctgaggatggcgtacgtcttctcgatgaaacggcgcacgaggccgtccttggtggaggccgaggtgtcgatggcgatgacgaagtcgcggatgcgccgctcttccacgtattccaacggctcgatgagcgggaggttgccgtagcgcttgagcccgtagcagtaataaacgtagtcgaactcgtcgtcgttcacgcggatctgctcgcccatccgggcgaacttgcgcaggaactcgcgatagtcctgcttctcgcgcgtcacggcgcgcaggttcatggcaaggttcgcgccctcgacgccccacagcttcgcgtaggcgtcaagctgcacgcccatctcgtaggccgcgctcttccactgctccttggaccgatctaggttcaccgtgtcggcgaagcggtcgtcgatggagcgtcctacctgttcgggagcctctttctgcacgatgtcgtcctggctgaccgcctggtgcgacttgtggttcggcttcgcctggtcggcatcggacggcatctccatgtcggttccgctcgtggcggattgggccgacgcggctccgtcctgcgcgtccgccccctcatcgcgttcgccctcttccgaattcgttttgcgggcctcctctgcggctgcgaggcggtaccagggctcatggtcgtccatgtagaacggtgcgcgcagatcggccagctcggcatcgtcgagcccctcatcctgcaggtaccggtacacggtttctgcggttgccagcggcagcgccgcgtcgatgcgcgcgagggtcgcgcgctggcgctcggcgcgagcggtgcgggtggcgggcaggtcgagttcggagatggtgcgttccacgacgatgtcgcatgcggcgtcccagcgcgcaacgtccacgtgcgggccggggtagaggtgcaggaacacgttgtgcagcacgatgtgcagataggcgcgagtgagttcggccggttccgcggcgtagaggcgcgcgagcgttgcggggtcgaagcggatgtgaaggccgtcagtggccagcgtggcatcgcgcacggggaaagggcgcaggcgcgcgaacgcagcgttcatgaagcgcaggttcacgagcagcgcgtttttcgcaaggtcgagcgcttggcgggcaagcggctcgacggcttcgacggccatgatgctcctttgaacgaatgtgcgtgcgcgaagcgcgtgcttgcttcgcggcggctcttgccttcgtcgcttcccgcagtgtagcatgggggaagccaagggtaaacaggctcgttgccgagaggtttttgggaggtagcacaatactatgatggagaacacgctggtctatcatggtgctcatgcgccgatcgaagaattgcttgatcatgcgatcaagaatccggtgcgcctcgacgcgcgcgatgtggaggttgtcgaggctgcgcgggcggtggagggcgaagtgtggtctccgcagcttccggcttatcgggcctgggctgccgaaggggaagccggcgacgtcgcgggcggtgcgggtcgcgagggggatctgtattccgcaggcgcgctgtggatgggcgagttcgacgagctgcttgcccaggcggccgaacgcgatgccgccgacgcgcaggagacgccgcgcgctcgtatggaggaagggctccgcggagccgtgggggtgcggcaggtgcccggcggatatgccctgaccgcgttcgatctgcggagattcgctgcggcggtggggcagagcgacgatttggcggttctgctgcccgcgtacgtggacgggatccccgtggtgcgcgtggccgtggaagcgttcgcgcgccgcttcgtgcagggcgtgggggtgctgcttctggtggtgcccgacacggtggagcatatcgctgcgaacgcgttcgcagcgatgtcggcgcagcggatccatatcgggcgcggcgtaagccagctaggagagcagcgctgcgatttggcgggagtctcgccgcggttggcgcgccgggagtattcggtggatgccggaaacgcgcgctatctggcgcgcgagggcaacctgttttcggacggcggacgggagctcgtgttcttggcctctccgtacggcgagcgcgtgagcctgcccgatggggtggagcgcgtggcttcgtcggcgtttgcggacggttgcgagccccctgcggtggtggactgctcggcggcgcttgcgcgcgttgactctcgcagctgggacgacgcggtctggcgctgcccggtcgaggctcccgcgtaccgcgcgcttcgcaagcgcggcgtccgtctggcggggccggcagccgtcgagttggaaggatgctggtacgacttcgacgcggagggcgcggtgctggtagcggggccgccgaagccgatatcggtgtcgcggcgcttcgccgagcaggctgcggtgcgcgccgtggccgtgcgcggcaaagacgaggttgcagacgatgccgacgtctgcgcgctttcgcccgctgcggcggctgccgaggcggccacggagttcgcggcctcgggggaagcgggctccaccgtgggttacgtgtcggccagcgcgagcgacgtgctggcgcttccgcgacaggtggaagggcggccgctcgtgcgcatcggcgtaagagccctgccgttcgcgccggcctcggtggtggtacccgaaaccgtgcgcatcatcgaacgcgacaacgcatgccgcggcacgaagcgcctgatccttcccgaagggctggtttccatcggcgcgcactgcttctggtcgcgtaagctggaggggcccgtgcttatcccggcgagcgtgcgctcggtcggggagggcagcttcgagtacgcggtgtgccgcctgtcgcacgtgggggcgatcgtgcacgtgtcggccgatcagctgctcacctgctttctgacggacgcctccgacggcgttccgttcgacttcgggcgctacgacgagcttctgcggtcggggaaaaacctgcccgatcgtttgggcgcgctgctgcaccggctggccgtaccctaccggctcgccgacgacatgcgctcggttctggtgtcgcacctgcggggctacgggcgcgaggcccaggagcgcatcgcgcgcgagggagatcggaacatggtggaagctctggtcaaggccggttttatcgacgatgcctcgttcgatcggcagatcgagcttttgcgcgcttgcaaccgcaccgactgcgtggcgtacctcatggagcatcatcgcgcccaggccaagccgacgagcgcgaaggagcggttcgcgctgtgagccacggcgcgtaacgcgcgtcggaaaggcgtggaccctgcgctaggtttaagcggtttgagcgactgggcgaatccgcttcggcggcgcgccctcgcgctgctatacttgatggctctggaacgaacgaggctgtaagaggtgcgcgatgatcgacgagatccaagttgagaacctggcgctgatccgcgaggcgacgctggtgccggcgcgcgggctgaccgtgctcacgggcgagacgggcgcgggcaagacggcgctgctctcggcgttgaagctgctcatgggtgcgcgcgccgacaaagacgccgtccgcgacggcgaggaagccctctccgtgtcggggaggttctacggcgccgtcttttccggctttgcgtcttccgacgatcttgcgggccggtcttccgctgacgcggttgaaagcggggaggcggacgacggcgttcccgtcgagctggtcgccatgcgccgcgtaacctcggacgggcgttcgcgcgtgtccatcgacggccgcatggccagcgtcggcgagctggctcgcgccattgctcccaccatcgacttgtgcggtcagcacgagcaccagcagctcatgaaaacgtcccaacatgttcgtatgctcgatgcctgggcgggcgacgcggtggtacaggcgcgcaccgcctacgaggaggcgttcgcgacggcgaacgcggcggcggccgagctgacgcgcgtgcgcgaggcgggcgaggcgtcctcggccaagctcgacgaggcgcgcttcgtgctgcagcgcatcgacgcggtggatccgcgcgagggcgagtacgacgagctgctggacgacctcgcccgcgtggagcatgctgaggcattggctgtcgctgcgaacggggcgcatgaggcgcttgcgggcgagcagggggccatcgacgcgctgggcagcgcggtggcggcgctcgacggtgcggcgcgttacgatgccaagctgggcgagttcgccgacgcgttgcgcgaggcgggctacgtgttggaggacatggcgcgcgagacgcgcgactaccgcgagggcgtggagttcgaccccgagacgctggtgcagcagcaagagcgcatggcttcgctgcaagggctcctgcgcacgtacggtccgcgcatggaagacgtgctggcgcgtcgcgccgaagcggccgacctcgtatcgctcgtggacgatgccgccgagcgcgaacgcgcggcgcagcgggagctcgacctggccgaagaggcgctcgcgcaggcggcgtccgcgctggccgacgcgcgcgccgaggccgccccgcggttcgccgaagccgtgacggcgcagatggatcgcctggaaatgggcggggcgcagctggtgtgcgacctcgcaccgctcgagcgcgttcagtggacgaaggcgggcccgcaggccgtggagttcctgttccgacctggcgccggcatgcaggcgcgtccgctcgcgcgcatcgcatcgggcggcgaggtcagccgcgtcatgctggccgtgaaggtggtgctgggcgaggtcgacgacgtggacacgcttgtgttcgacgaggtggatgcgggcgtgggaggttcgaccgccgtggcgctggccgacgtgctggccgatttggcgcgcacgcaccaggtgatcgtcgtcacgcacctcgcgcaggtggccgtccgaggccaggcgcactacgtggtgcgcaaggctgcgggggacgagggggccatgcccgaaaccgacctgcggcagctgcccgaaagcgagcgtcccgccgaaatcgcgcgcatgctgtcgggcgatgctaccgagacatcgcttgcgcacgcgcgcgagatgctggcccgagcggccggatagcccaagcgggcgactcgtttttcttgcgttccgcgccgttcgctgttagcggcgatccccgttgcgttgtctgccgatggcggttgtgcaggagatttcccctgcggtgcacaaaaagatgcgacgtttgacgcacggggctgagaaaaggcgcgacaaaacgaaagcgcgctcccttgttgggaagcgcgcttccttgacctgctgttttcttcggctgctcgaattgctgctgcaagctgcgaccgcgaaatatcaaacgtcgcgtctttttgtgcaaaaaaggacgcgtttcgtgcaaggacccgccgtgctggcgctcgacgtgccctgtccgttgccggtgccctctctcgttggctacgagcggttgctccgctttttccgcgtgatctgcatggcgatcgcgcaggtcagcgttacgccgccggcgagaagcgcgatgcccagcgcaatttgcggcaggggcgcatcgcccgtcgcggcgagtgcggcggcgttcgccggtgcctgcttggagtcggtcgtgcttggcaagggcttgggcgcatcgggcttcgactccggcttcggtgctggagtctcgggttccggagcgggcgccggcgtgtccggcgttgggggaaccgggggcgtgggagccgccgcgccctgcgccgcgaggagcaacggcccggtgacgacgctcttcttgatcgcgatcgcgccggtggccgggtcgtacgtgtaatcggtgcccgcggccagtgcgagcgtttgcccgtcggccgccccgcagcgcacgtcgatcgcgtcgggcagcaggtagccttcgttcgcgctcagctggtagaggttcgcatctgcgccgtccttctcgaacgcggcggtcaacgcggcggacggttccgccgggaagcctgcagccgtgttcttcggcattgcgctgggtaccgcggcaatggacagcccggtcaggttcgcgcgcagcggatacgcgcacgaggtcacggtgccgtcctggtcgctgatgacgttctcgaagataccgccttcgatgacgcctcggttggtcacgtcgctaaggaacgtgccgcctgcgatggttccgtggttcgtcacgctgccgttgaacgtgccgcccgtcaggacggcgttgttgtagtcggggtcgggatcgccgttggttacggtgccgtcgaacgtgccgccggatatggtgccgccgccggtggtggtgtcttcgtcgttgcttgtcacggagctggtggaggagaacgcgccgcccgcgatgacgcccctgctgagaatcttgccgctgaacgtaccgccttcgatggttccgaagttgtctatttcatccgagttgaacgtgccgcctttgatggtgcaggatcggttctcgtcgggatcgaacctcatgtatccgttctgcacgtatgcgttgaatacgccctgaccttcgatggctccgccgttgtccactccgatgttgaactcgccgccgcgtatcgtgccgtcgttggtcacgttgttgttttcgccgccgtcgttgaacgtgccgctcgaaatcacggcgccgtcgtagttgttcacgtagccgttgaacgtgcctcccgcgatggcgccggcgccggcgttgttggatgcgttttgcacggttccgtggaacacgccgtcctcgatggttccctgattctgcatgcggccgttgaacgtgcctccgcagatggagccgccgaggttggagctgttgccgctgttcacctctccgttgaacgttccgccgttgatggcgaagcctttgaatatgttcacggactcgttgaacgtgccgtcctcgatcgcgccgcttctcatccccatgaccatgcagtcgaacgtgccgcccgtgatggtgccggaggaggtgctcacgtacgattttgtgggatcgttcgggtcgctgttgaaggttccacctgcgatgatgcccgcgtttccgatgcttgcggtgaacgcgccgcccctgatcacgccgcccgcttcgttgcgcacggcgaaaccggacgtctgcgacgcatcgacgaacgtgccgtcctcgatgacgcccttgttccgaaggaggttctcgctcgagacgttgagcgcgtggcccgtgaacgtgaacgcgtgccccgcgccaagcgtgagcttgccgtcggcgtacgtccagccttctcccgacgtgccgatcggcgcgccgtcggcgccgatttcgatggtgacgggaacagcgctcgcgaatgcgacgtttgggtcgagcaggcagacgaatgcgagggcggtagcaagagcgatcaggcgttttctcatgggagttcccttcgggcaggttaacgctcagatgctagcatgcaaggggagtctgtaggcgaccgctgcgaaagcggtgggatgcgctgcgaaaaaagacggcagccaagcggctgccgtctcaggggagcgaaaagggaagggcgcgttagatggacgatgccatcgcttcgtcgtcggggagcgcggcggcttcctcggagcgctccagtttcgacgccgcttcggcgtcgcgctcggccaggtactgctgcatggagtagtgcgtgatgtcggagcggttgatcacgcccaccacctggccctcgtccagcacgggcaccttcttcaagtggttctcgcccaacacgcgacacacttcgggaaggtcggcatgcacgtccacgccgatgatgcccttcgcgccgatgctcttcgccggcatgcccatgagctcgtcgagcttgcgggcgaagtcctggttgccgccgtcggcgtccacggtctgcatgatcatgaccacggggtccatcagcatctgcgatcgcttcgacaggtagcgcatgatatcgccgtcggatacgaagcccacggccttgccctgttcgtctaccagcggggcggcgctgatgtgccggtccatcagcacctgcatggcttcggccacggtggcgttggcgggcagcgtgtacacgtcgcgcttcatgatggactccagcaccgtgcggcgggagttgtcccgatccttctcggcggcctcgcccggtttgttcttcaccagcgccacgaccatgacgaagccgacgaggcacagcgcgccggctagggcgaacgccacgtcgatgccgaagatgctggcttgcgtgggagtcatcgtccgggagctcatgttcgtggcgatagtggaggccgaaacgatgatggcggtgcccagcgagcccgccacttggcggaacgtgttgttcaccgaagtgccgtggttcaccagctcgttgtcgagcgcgttcatgccccaggtggtgatgggcatgttcaccagcgacagcgagaacaggcgcacggtgtacagaagggtcaaggtgatgatgccggtttcggtgctcaggaatgcgaagcagaacgtagtcagcgtgagcacgcccatgcccacgagcgccagcacgcgcggtccgtgcttgtcgaacagacggccggcgatgggccccatggcacccatgatgatggcgccaggcagcaacacgaggccggacacggtggcggagtagcccatgagcgactgcaggtagataggcaccaagatgcctgcagccaaaagcgcgccttgcaccaacatgccgatgatcgtggcgatgaggaacttgcggttctgcagcacgcgcacctgcagcatgggcttctccatcttcagctggcgtcggaagaagaacacgagcgctaccgcgccaacgagcgtgccggcgatagcgtcggcacgcaggccgtaggagccgatggtggacaggccgtacaataggccgccgaaacccagcgacgacaggatgacggagggcacgtcgagcgtgacgtccttcttcgtttcgccgcccttctgcagcacgaacgcgccgataagcactacgacggccgacagcgcggtgatgatgtagaacatatcgtgccaggtgtagcggtcgatgatgacgcccgccacggtggggccgatggcggggccgaacgcgatgacgatgccgaacaggcccatggccgtaccgcgcttgtccacggggaacgtccacatgagcaccgtcatcacaaggggcatgaggatgcccgcgccggcggcctgcacgagccggcccagcagcagcacgacgaagctgggaccccagcccgcaaggaagctgcccaacgtgaagataaccatggacacgaggaagagccgcttggtggtgaagcggtccgtcaagaaagccgtgatggggatcatgatggcgttcaccagcgtgaagccggtggtgagccactgcgccatggaggcgtcgacgctcatctcggtcatgaccgacggcagcgccggggcgacgacggtctggttcagaaccgtcacgaacgtgccgaacaccagcacggccagcatgacgatctgcttgcgcgttaaacccatatacctgttccttccgaatgtgcgctgcgaacaaaaacgcctttgaaggggagcttgcagctaacccgacttcaaagacgcccgttgtcatgcggttgacgtgatttacactcagtataaatattcattcggtagatgaaaagtgctcggcagtaaagttgtggtaccctgcaccgaaacggcacatcgcggcgatgaaagggtgcgcgcaacgtggaacagacaaagccgtcggcggaaggcctgcggtatcgtaagaagctcaaagccaggctttcggtggagcgagcggcgttagagctggtcatcgaacggggctacgacggcgtgacggtagaggacatctgcgcccgtgccgagatctccaagaagacgttcttcaactacttcccatcgaaagcggccgccatcatgggtcgtctggactcgtttcccgacgacgaacagctggttcgcatcctcgaagagcatagcgaagcctgctacctcgacgtgttggtcggcgtagtgggaacgggcgccgcttcgggcgtggacgagggcattgtgaacctgcgacgcgaagcgctgcgctccatgcctcagctgttctttcaaggtcagcgcgacatattggctattcagcgctccatggccgacgctttgcgcgcgcatttagccgagtgccccgaacggcgtatgctgacggatcgctcggtggaggaggaggcgcttgtggcgtcgtcgaccgctatcggcctcgcccgcactcgctcaatgctgaccgtgtgcggcgatttggagccgtcggcggccgaaacgcgccgccttgtcgccgcgtacctgtcggccggcgacaaggcgtgtcaaggggacgggtgatttgacacgctttgatggtatcaagggaatggtgccaaaggggcgtgtgtcaagacacccgtccctttggcacgccggacacgtccgacggatgctgtgaaaaacttcttgacagcttttcctaacactgtgctatagtttgcgccacaacttaataccttgaaaccgatgaggcgaaggtcaagccgtcatgagcactcacagagagcgggcgcagctgggattcccgcagtaagctggatggtaaatggatcgccgagggaaaggggaaaggaaggcgcggcgcgcaagcggccgggctgaccgagtatctggaccgtgagcctgcgttaagggcagaacatgtgttggcatgttcgtgagagggttctgcatcgcggaatcaactgtgaaggtggcaccgcaggtttacaagacctgtccttcgatgagaaggacaggtctttttcattgcgggggcgcacagcgccgaggccatgaggttgattgcgcggagtgatcctcgtccgcgaagttcgtgccggcaaaccagacgccccgggaggggcacgcgaccggcggggactccgccaagagaggattgaggaacatggaacagcagatcaagcgcgaggttgcgacgcaaacggcgacggcaggcgaggcgtcagcgccgcgcaagcgcgaagtggcggcggcgccgagcagggcgggcctgtccacgcaggacctcatcctcatcgccgtgctgctggccgcgggcgcggtgctcaagctgacggtgggctcgctgctctcgtcgatgggcatgaagccgaacttcatcatcgcgatgtactgcctggccatcatcctgacccgtccgaagctgggacaggccctggtcatcggcctgctggccggcctcatctgccagatccccctgttgaacgccacgccgcttctgaacatcccctccgaggtcctgggcgcgctcgcctgcggcttgctgatcaaggtgcccctgcgcatcggcggcaagctcgacctcaacccgctggtgaacacgttcgtctccacggtggtgtccggcggcaccttcgccctgctgtccgtctacatcaacgtggtgtccacgggcggcgacgtcatggtggccctggccacgtacgccgccatcgtcttcggcaccgccacgttcaactgcatcctcgtccaagtcctggccatgccgctgaagaaggtgctgaagcgctagggtttcgccgttctccgaacggcgaaacagcccgcctcgctgactcactacgccaacctgcgaccccagaaagactctttcatgatcaagatacgcgacttcacgttccggtaccgcgagggcgaccgcccggtggtcagcggcatcgacctcgacattcccgacggcgcgttcgtcgggatcaccggggcggccggctcgggcaaatccacgctgacctacgcgctgaacggcatcatcccgcattgctatccgggcgacttctacggctccgtcgtcgtcgacgggctggacacctgcgaagtcgcgctcaccgacgtgtcgcggctggtgggcagcgtctgccaggacgtcgacagccagttcgtcacgtcggtcgtggaggacgagatcctgtacggcctggaaaacttcggcgtgccgcgcggccagatcgaggatcgcgtggcgcaggcgctggccgacatgggcatctccgaggtgcgcgaccgcgtgatctcgtcgctgtcgggcgggcagaagcagaaggtggccatcgcgtccgtcctggcgctgaacccgcgggtgctcgtgctggacgagcctaccgccgaactcgatcctctgagttcgcgcactgtgttcgacctcttggcgcgctatgcgcgcgagcatggcgccaccgtcgtggtggtggagcagaagatcgcgctgttgtcccagtacgccgatatgctggtcgtcgtcgacgaggggcggattcgcttcgccgacgcccccgcgcaggtgctggaacattcggacgagctgaaggccatcggcgtgaactgcccgcgttcgaccacgctcatgaaccgcctgcgcgctgaaggcctgtacgccggcgcgcccgtccgtaacgtgcgcgaggcgcgcgaggcgttgaaggaggtgctcgcatgatcgagttccgcgacgtgcacgcgtcctacgacgggtcggctcccatcctgaaaggcgtgagcttcaccatccgcgacggcgagttcgtcgcgttcgtcggcacgaacggggcggggaagtccaccacgatgcgcctgatgaacggcctgctcaagcccgatgccggccaggtgctcatcgacggcgtccccacgagcgacctgcgcaccagcgagctggcccgccgcgtgggctttttgttccagaaccccgacagccagatctgctgcaacacggtgcgcgaggagctgctgttcggcttcaaagcgctggggctggacggaccggacgccgactcgcgcgtcgacgcgatcgtcgaggagttcgccttcgaccccgacgacgacccgttcctgttgaaccgcggcgcccgccagctgctggcgctggcgtccatcgtggtgctcgcgccgccggtggtggtgctcgacgagccgaccaccggcctggactatcgcgagtgcgtgaaggtcatggacatcatccgccgcatccacgagcgaggcaccacggtggtcatggtgtgccacgacatggaggtggtggccgattacgcggcgcgttgcatcgtgatgagcggcggcgaggtggtggacgacgctcccacgttcgacgtgctgcgcaaccgtgaaacgctcgagcgcgcctcgctcgtcccgccgcagatcgtggagctgtcgcttgagctgggccgcgagatgccgcacctcgcggacgggcccgtcggccgcgccaacacgctggacgagatggccgcggccgtcatggaggaagttcggacgagcgaaaggagcgtgtgcgcatgagctcgtttctggaatacgtgcccggcaccagtccgctgcatcgcatgaacccggtggccaagctggcggcggccgcggcgttcgcgctcgcgtgcttctgctccagcaacctcgcgttcttggccgtgctgctggcggcaggcttcgcgctggccgcgacgtgcggcatggtgaggcccgccatcggtctggcgaaggcggtgttcgcgttctcgctgatcttggctgtagtgcaggtgctcacgacgcccagcggcgcggtgctggtagagctgccgtggggctacgtcggcacgggcagtctgctggcggcgttgaccacggtggtgcgcctcgtggctgcggccatcccgctgttcctcgtgttctacgtcaccaagatgaacgacgtcacgaacgccgtggtgaaggtgctgcacgtgccgtacaagtacgcgttcaccttcacatccaccatccatttcatcccgatgttcatgaacgacatgaagggcatcatggaagcgcagacggcgcgcggcgtggagttcgacgcgggcggcatcgtgcggaaggtgcgcctgatggtgccgctgtgcgtgccgctgctggtgtcgtcggtgcgcaagaccaacagcgccgccatagccgcggaggtgcgcggcttcaacctgcgcaccgcgacaagcggctacaaggagtacccgttcgtcgcagccgacgtggccgcgatggcgggatccctcgcgctcgttgcgatcgccgtggccctgggagtgctgctgtaacggctgcggaagcggttcgctagccggcgaaccgcttcccgcgaaacgcgtggaggtcgcgtgctaaacgaccggtgagctgatagttgtcttcccataggcgcttttcgacgatgaaggtgcggtaggaaatggggcagtgccgtataaaggcgaacattcggttgaaaaggtatcgccggtcttcgtagctccagtgatagtagtcgtttgctttgtggataagcggcgatgtgtgtatgggcctgagcggaaagctctcgaacaaacggtggagattcgccaactgctcagtcatcgatgtccttgcacacgaagtacgagccgatgatgctgatgagcgcccaggctgcgaaaacgaccatggtggcggcgaatgcgagatcgccgtcgaagaggatgccgcagacgatcatgaggatgccggcggggatggacgtgcgcgcgccgaagcgctggcctttctgccacgcggcatcgcttttctgggtccacggcaggcgaacgccgaaggccgagttgcgggtcgctttgggcatgaggtagccgaggaacagcagcgtggcgccgatgacgaaagcggcgatcttcgacatgccggcgtcgggagcgccgagggagatatccgaaacgtcgtgcgacaggatgttcagggatgcgaacaccgtcacggcgatgaagatcgcctgcatgccgacggtcagcttcatcatggttgcgcggttgccttcgtcgccgaacctcgtaagcaacatcatgaacaggccgaacgcaagcgcgagagcgggcgcggtgaagctttcgaacctgctgccgatgcggtcgatctcgccgcccgtgaaatggaccggcacctggtcgggcatgatcgccacgaacgccgccgtcacggcgacgtcgatagcgaacagaacgccgacggcgatgtagcccttcttcatgatgcgtcctttcggttcgctccctttcagcggctctctcgccttccagtatagatcgtccgggggggggggggg

SEQ ID NO: 48 - DNA, 49277 bp, Eggerthella lenta
  source 1..49277: mol_type = genomic DNA
ccatgacaatttcggcggtgctgtcgggcatcgggggttgcgtgcggattatgccacctggggttatgcggtcggacgaggcgatgcggcgcgtcgaaaccgcttcgcgattgccatggggggcgttttgcgcccaggtcggcctcgcagctgcgggcgagcgtccggcacggtgaggttccgtcgggcgcaggcgagcgtccggcacggcggtcaccgtcgggcgcgggcgcgactggccttgcccaggcctgatcgcggaatgtgtgcatccttcgcaaaccgcttgcgcacgctgctatcatggaactatggaaagcgcacaggcgatagagcgagaacggaactatggcagcgcgggtgataccgcgcaaggggtatccgacggcttgccgaagagacagcgcaccatcgtgcttgcggtcatgatgtcgggcaccaccgccgcgtgcatctcgcagagcatgatgatagccgcgcttcccaccatcatgcacgagtactccgtgagcgcctcgctcggccagcttctcaccacgtcctacatcttcacgcttggcctcatctcggctatgaccgcttatctggtgcatcgcgttgattcgaagaagctgttcatcgcagccatggtgtgcttcgtcgcaggttgcgcggccgcgctcgtcgcaccgaattatccgctgctgttggcatcgcgcctgctgcaagccggcggcgcgggcatcgcgctgccgcttatccaggtggtggcgctgtcagtgtaccccaaaagcgagtacggccgtgcgatgggcctggtgggcctcatcatcggcttcgcgccggccatcgggcccaccgtatccggcttcctcatcgacttctggggctggcgctcggtgttcgtcatcttgggcgcggtgtcggcggtggttgtggtgctgtcgttcttcgtgctgtccgacgtggtgaagcgcgaagggtcgcgcgagcggttcgacgtgccttcggggcttttgtacacgcttggcttctgcggcatcatgctggggaccacggttatggagtcggacgctgcgttcgatcctgtgtctttggcggcgctcgcaggcggcgcgcttgcgctcttcgtgttcgcgaggcgtcaggcgcgcatcgagcagccgctgctcaaactgtcgtgctttcgcaaccgcacgttcgcgatagccactgtgctggtgatgatgtcccagatggcgttcatggtcggttccatcatggtgccgttgttcgtacaggacgtgcagggcggcagcgccacggtgtcggggctgactatcctgccgggcgcggtgctgctagggttcttgaacccggtgacgggacgcctgctcgaccgttacggtccaaggccgctcgttgcggtgggatgcgcggtgctggctgcgggcacgctggcgttcgcggcgtgcgacgcgggtacgcccgagtgggcgataaccgtgttgtacggcgtgcgcacggtgggggtcgcatgcctcatgatgccgatgaccgctcacgcttgcgcggcgctgtctcttgaagacatcgcgcaaggcacggccatcatcacgtcgtttcgccagatcttcggtgcgctctcgtcgtcggcgcttatcacggttatggcgctcgcatcttccaacgagctaggcatcgacgtcggcggtttcgctttaagcttcgaagtgcaggcggccgtcatcgtcgtgggcttcgtcgtgggcatggcgtttctgccgcgcccgcagcggaaaacgcgctagaggcggctcggctgagcgtggttcgcgctatgctgcggctgccagggacggctcggcgtagcgggccctgatgtagcggtcgatggcgtcggcggtttggctctgctgttccgcgggggtgatgctggcttcgccatcgccgctttgcgggccgtaggcgccgaagccggcatggttgccgccttcgatctccacggtttcggctcccttgggcagcaggtcggcgttgtcctcgagcttggcgcggttgagcatctggtcgttcgagccgtacagggagatggcgcccaggttcgtgctcgacaggtcgctggcggagtaggatcccaacagcacgaggccgtcgagcgtgccgtcgccggcatggtcgaccgcgtactgcgccgccatcgagccgcccagcgagtggccgcccacccaccaggtgcccacgtcggggaagtccgcgcgcacgcggtcggctgcgttgatgtcgaagaacgcgaagttgaacggcatctggaccactacggccaggtagccgcgctcggccagatcgcgcatgagcggcgcgtacgcgctgtattccaccttcgcgccggggtagaacacgaggccgacggctgcgttcgggtcgccgaacgcaaggtagttgtctccctgctgaacgggcagcgtctcggtcgacacgaggttgcgatggttcgcgtcgaggtcgtggtacgagtcgctcgcgtacgcgaagaacgcggctgccagcacgcacagcaggatggcgagggccgtcagcgcgacgacgagcttgcgcggcttgcggcgcgcggcgacgggcgtgccgctttcggccgcttccgtcgtgggtgtgggttcgttcgtttccatgacgagcatggtagcaaaagagtgccatgcgcggttccggatctgcaacgcttgccttgcatttcctcttcgtgataagtatacttgacattgtgataagaaaacttggcagaatgaaccaatgaaaaccttgggatgccgtacgaggatgcccagttggcaaaaagcaatcgaattcggaaggtgagcgcggtccgattcggtggcaagtccaacgtgattgaggatgtcggctcgcgaccaggtattttgcagagtgggtagccgcgtatcgctgcgatcagggattcaaacttccgaattcggaggtttttcgccaccgagaagctttttgcgtgcttggtgaggcatgagtacaaatgtttcacgtgaaacatccggaagcgaacgggcgatgcagaaggaggcagccatgaacaaggacgagattctggagaagagccgtcgggacaacgacggaatggacgagcggttcaagctgatgcaatggcgtgcgagctaccttatgctctccgtgatgatggtggtatgggcgttgttgttcttgtgggattcgcttcatggtcagagcacggatgtgtcgttcgccattgtcatgtcgggcatagccgccatgaacttctaccagttctaccagtttcgttacaaaaccgcgttgggtgcgggcgttttggtgacggtcgcggtcatcagcgtcgtcgtccaccatatattcgcgacgatgtaggggcacttcatgatcaagctaccgtctctcggattcgacgatgtgcatgacaacgacggcgagctcgaactctgcaaccggctgaaggcggcgcgcgccgaggcggggctttcgcaggcagagctcgcggggctcgtgggcgtctcgcgccagaccatctcgtccatcgagacgggcctgttcaaccctacggcaaagctggccctcgtcctctgcatcgcgctcgacaagaagttcgaggatctgttctacttcgagtgaggcgcgtgcaagggcgcgtctaggatcgacggacgcgcctggctcacttccagatcttgcaggcttcggggtcttcggccagcagcaggtcgcgtagggcttgcaggtcgtcggccgagacgtcttcggggttctcgtactccagcgtgtccgccacgtgaaagtcgaagccgttctcgccgtgctcgctccacagctgctgcagcggacggttcgggtgcccgcctccgttcagcttcgcccgcaggctgttgagctccttcgccgcgtcgcgcgtgatgcccagaaagtgctggcccgtggcagtgcagcgcagttcaaccacgcccatgtcggggcggcggctcttgtatgcgtctcgcaattccttgcgtcggtcggtttgcatgcgtatcacctcgtcgtccacggtaccgcatgccgtccgggcgcgcaatctacggaacgtcgaccgttgccctcgctcgcggcgctccgtgccctcaatcaggccgaagccggctgatcggccgcgccggcctgcatccaggcgatgtacgtgtcggggtagtgggcggtcagcgcggccgaaaggtcgaggccgaggagcgactgcacggcaccgacgatgcccaatgggctgaccagcgcgtcgagcgtgggcacgcgggtggatgccgtggagccgaacgtgctcagcgtggcgaagtcgtcctcgtcgcatcctaacgcgtagccggtgttgcgctggtaggcggtctgcacgatggcgtacgaatcgtcgaagtcgacgcttacggtgctgggcagcgtgatggtggagccgtagcgtccgaaaccccaggaggaaagcggcagctgcgtgacgatgtccgcctcgttcaccacgttgaagatgttgccgaacctcggatcgtgccggtcgtcagcgcgcgtggcgcacggggcggcgaacgtgtaagcgtagatgccggacgagggcgccagcgccgacgcgtcgtcgtccgggtcgccgaggtcggcggccagcaggttcgcgatggccccgccgcggctgtgccctgtgatgagaatgcgcgtgtgagcggggtcgatgcccagatcgctcgcgtaggagcgcactgctttctcgacctcttcctcggccgctttgaacccgcggtggtcggcatcgtcggagccggcgcccaggaagttgaagttgctgagccactctgcgccgtacgtgccgcggatgcccacgaacagaagcgtgacgggcttcccgtcgccgtccgaagcgatggtcttgctggccaacgtgtacgcggccacgtcgctcgatcccaccaacagtgagctgacctcgtcgaggacgctgctgcgcatcgcgtacgactcggtgcgcacgtcgtggaatcccagcgcgccaagcgtccgctcggcgtagggcagcgaaccggccacgccgtcgtagtactgggattcggaattgcacaccgccgccaacacggaacaggccgtggccagatcgtgctggtaggtgcgggcgtcgtggaagaaccaggagtcgtcgaacgtcagctgcgtggatgttcgtcctgacgggttgtttgggtcgagggcggccaccacctcgctgcagtattcggcggtgacggtggtgcgcggggaagcggggacgtgcgcgacgaccgcgtttccattggcgtgcgcgacgggaacgagccccgattcgtagcccgtgtaccggagctgtaccatgaacagcgcgatgagaaggaggcagccgagcagggaagcgacagccgacgcgaagcgtcgcgcggggttcgtctgcatcggtcctccttcgccatcggtgagtgcttccttcgtttcggccagtatacggtgtcgtgccgccgcggttaccggtgctggcgcaacgcaagtgaaacttaagcgtgctgtaagcatttcttaaggtttggggcacgttgcggcaaggttcgggattcctttgcatcgcgggcgtgaaacattcgcgtgcgatctgcggggacgaggggtcgaagcgtttcctcgtgctagaatatccagttgcttgccaactggcgaacgaatgctggttggcgcgcgtcgtccaagcgcgccgcatcatgagcggcggcgctcgaaagccggctgacgaggcatcatgcgccgcgcggccccgaaatgtgaggaagcaccatgtcaaagggaacctactcgttcaccacccccatctactacgtcaacgcggccccgcacctcggcaccgcgtacaccaccatcgccgccgacaccgtggcgcgctaccagcgcatgaacggctacgacgtggcgttcgtgacgggcatggacgagcacggccagaaggtggccgacaccgctgccgacaagggtatgaccccgcaggattggtgcgattccatggagcccgcattccgcgacgcatgggatatgctgggcatcacctacaccgacttcgtgcgcaccaccgagccgcgccacgccgttaccgtgcagaagttctggcaggacctctacgacaagggctggtgctacaagggcagctacgaaggctggtactgcgtgcacgaggaaacctactacgccgagagcgacctcgagaagaacgacgagggcgaattggtgtgccccgactgcaagcgccccgtgcagaaggcgggcggcgaggagaactggttcttcaagctgtccgagttcggcgacaagctgctggcgttctacgaggagaaccccgacttcatccgtcccgagacgcgcaagaacgagatcgtgtcgttcgtgaagagcggtctgaaggatctgtccatctcgcgcagcacgttcgactggggcgtgccgctgccgttcgacgagggtcacgtggcctacgtgtgggccgacgcgctgctggcctacctcaccggcatcggctacggcgacgagggcgagcgcgccggcgagttcgacgcccgctggcccatgcagtaccacttcgtgggcaaagacatcacgcgttttcactgcgtcatctggcccgccatgctgatggcggccgggctgcccatcacgcacacggtgttcggccacggcttcctgctcaccaagggcgagaagatgtcgaagtcgaagggcaacgcgctgaagcccgcggacctctgcaaggtgttcggcgtggacgcgtaccgctactacttcatgagcgacgtgcagttcggcgccgacggctccatctccatggagcgcatggtgcaggtctacaacgccgatttggcgaacacctggggcaacctgtgcagccgcgtgttcaacatgacgaagaagtacttcgacggccaggttccggaggtgtccgccggggttctcgcgaaggagaacccgctgcgcgccatctcggacgagctgtacgccgagtacgacgccgccctgggcgccgtcgacttcacggccgccgcggccgccgtgcagaagctggccggccgcgtgaacctctacgtggaggagagcgccccgtggaacctcgcgaagagcgaggagaccgccggcgagctggccgaggtcatctacaacgcgctcgaggccatccgcatcatcgcgctgtacatggcgccgttcatgccgaacacgtcggccgaggtgttccgtcgcctgtcgctgggcgacatcgaggccgtgaccgacatcgaggccgcgacggcctggggccagctgcccgccggcaacccggtggaaatcggcgaccccctgttcccgcgcctggacatggacgccatcgacctgagcatggagtagaacggttccgccggcctgccggccggcggaacggccgacgctgcggcgcgtcctcgcaagcgatcttcgtgcgatcccggagcctcgcgtaccgcggtacgcttcgcctccgcgatcccgcgaatctcgcatccgaggacgcccctcgctggctttgttggaccggcgacgactcgaacaacctgcgagcaagaaaggacgcgaccatggtcgacgaacagagcgcggaacccgtcttcgacgatccgcagttccggcagaagcgcaagcacggccgttaccgcgtggtggacgctccccagctcgaggggcctgtggccgacacgcacgcccacctgcagcttctgcccgatccgtcgtacgcgctcgcgcgctgcgcagctcacaaggtggagttcgtctgcaccatcgtggacgtgttcgaagacggaacgaccacgttcgatcgcttgaactcgtggcggttcgaggccgctgcggctgccaagcgcttcgtcggctggacttgaagcgaccccttcccgcgcgtgccgcgggttcggatcgccgtcgggtgccacccgcataacgcgaagtactacgacgacggcttggaggccgatttgcgccgtatgctcaaggacccgcgcgtggccgcgctcggcgagatcggcttggactaccactacgacttctcgccgcgcgacgatcagcgcgaggccttccgtcgtcagctccgcttggcgaaggaggcggggctgcccgtcgcgctgcacctgcgcgaggcgcacgacgaggcgctggccatcatgcgcgaagagggcttccccgaggcgggcacgctgctgcactgcttcaacctggactgggccacgctggaaccgtgggtggaagaggggtgctacgtggcgttcggcggcgcgctcaccttcaagaacgccgacgacacgcgcgaggccgcagcccgcgtgccggcggatcgtctgctcaccgagacggatgcgccgtacatgacgcccgaacctatgcgcggcatgacctgcctgcccgatcacgtgctgttcacggcggagcggctggccgaggcctgcgggcgggcgcccgggacccagcgcgaggagttcctcgctcggctcatggacaatgcgcgcgaactgctggatcgcccggccaccgcttggcagaagaacaaaggagcgtgacgcttatgaagcgactcatcatcagcggttcccctcgggcgcgagggcgcagcgcgggcgtcgcggaggccgtgcgcttcgctttcgaggaatcctgcgccgacgacgatgtgcagcttgtttcgttggcggacgttcgcatctccccgtgcacgggatgcgagacgtgtgcggacaccttggggcgcaacgagctgtactgcatcatctcggacgacatgctgcgcgtgcgcgagatgctgaacgcttgcgatcagctgacggtggtgtcgccggtgtacttcgcgggcgcgccgtcccagctcaaggcgttcctcgaccgcctgcagccgtacttctacgccaactggcgcgccaagccgaagcgaccggcaagcctgtacgtggtgggcgaggggggcgacccgcacgggttcggcccgcttgtgggcgaggcgcgctcggcgttggccgtggcgggcttcgcgctggaatccgtgcacgactgggtgggtctcgtcagcgcggacggcgcgctcccttcgggctccgacgtgctggagggcggccgcgtgcatccggcttcggcctacacgtgcactggtcccgaaggcacgtttccacgcgcggtggggcaggtctgatgacgaagctgtcgccgctggccagcgtgtccgagacgcgtgccgtcctggaagcgcacgggctttcgaccaagtactcgctcggccagaacttcctcatcaacgacgccatcttgcagaaaatcgtcgccctggccgatcttgtgcccgacgattacgtgctggaggtggggccgggcatcggcacgctcaccgtcgcgctgctgaagagcgtcggacgcgtgctgtcggtggagcgcgaccccgacctgcccgccgtgctggccgagacgctgtccccctgggccgaccgattcgccctgctcaacaaagacgcgcttgatttatgttccgctgatttccaatcagcggaaccactcgacgctgcggcttcccgtggtgcccgatctcgcggcgaggcccaaggctcgcgtaccgaagtacgcagcgccttcgccctccccacgatctcgggcaccacggaaaccctcgctgacgtagctggacccatgaggcttttacccaacaagctggtggcgaacctgccctacgccgtggccgccaccgtggtgctcgactacttcgagcggttcgcgtcgctggaaagcgccaccgtcatggtgcagaaggaagtggccgaccgcatggccgccagcccgggcacgaagaactacggcgcctacacggtgaagctgcgcctgtacgccgagccggccgggcgcttcgccgtagggccgggcaacttcttcccgccgccgcgggtggagagcgccgtgctgcgcctgaaccgccgcccggtcttcgacgaccaaggcgtgccgcttgatgccgatgcgatcgccgccgcctgcaccatggccgaggccgcgttcgccacgcgccgcaaaacgctgtcgaactcctgcaaaacctacttcgccggacgaggcccgcaaggggccgccgtcatcgcccggctcccgcagttgttcgagcgcgccggcatcgatccccgcctccgcggcgagaccctcgacctccccgagttcgtccgcctcggctgcgccttccagcagatcgcttgaacggttcggtcgctgaagagggctcgtctgccgaggggcttgccgccgagccgcttgccgccgagcagcttgcgccccccccctcgcgtcgtaaatccgtgggcgatgtgcagcaaaaacgaggttttggcagcgcgagccacctcgccggcgcatcgagcgaaacgcgacctggggtttcttcgtcgcgctgcccgcaaaagagcttcccgcgacggccgaatgaggttccgactgccaaaacctcgattttgctgcacatcgccgtgcgtccgctgttaaaccaatattgacatgcgccgcctcctccgtcggggagccggcgatcgagcgggacgggcgcccggccgacggccgaagagggcttccgagccgccggcgagccctcgcgggacggcccggcccggctatgtcaatattggtttaacagcggaaccgtgcgaatcggtgcacccgtggaccgaacggggcggtgcgccttcgcgagtctcggtcgcgggctaggcgtccttcagcgctttggcgcgcacggccttgcctttgctgcacttgggcttcgcaagcgggcagtgcttcttgcagcaggggcacacgcgtccgtcgagcaccgatgccgtctttttcgctttcgccttcttcttgtccggcttcttcttcttgtctttcttgtctttcttgtctttcttcgagctcatgtggatcctttcgcactatgttcgcggccattctagcatgtgcgtccgtgaggagctcgaagcctccgcggacggcagcgctcgcacggcgcccgcttccacgggggtttcacgtgacgaggcgcgaggtttgaattgttatggacttggggacaatccgtgcagattctgtagagtattgactcaggtggtataatttgaggctgtcatttctgcacactggcatacgcgagaaagagtgagcatggatttagcgaaacaagccaaaatcgtcgactccattcatgatacgttacacgacttcgtaggtcaacgcctgaaagttcgggccaatatgggtcggtcgaaaatcgtcgagagcgaaggcgttctcatgcaggtgcacccgcagctgttcatcctcgaggtggatcgcaagcgcggccgcacctcccgccagtcctaccagtacgtcgacgtgctgacgggcatggtggagctgtcccagaacggcgagccgctgttcgagcccttcgtgcccgaatcggccgacggcgcgtccgcggtggatctcatggacgagcaggaagaggagaaggtcctgtcctaacggctcagggctggttccggcaaaccgacgggtgtcgcaagcgcggcacccgtttttgcgtttccggccttgtttcttctgtcgtgcagcgaggtcagcgtatagaatagcggggtggaaagcgagccggggatcgacgcaagaggaggggccgtggcgcaagatcgggcaaaggaaggcgtgcgtttgccgtacgtgctgcggcatttcgacgtgtcgtacctgggcatctgcgcgccgcatgtttggatatgctgcgtggcgcaccgcgcggggctcgacttcggcggcgtggtcatcggcatcccgctgtacatcgcgctgtcggcgttcatgctggcggtgatgctgctggcctggaagggcaaggcgcagcgcgtggcgcccaagctggattggccgctggccgcgttgcaggcggccgcgactctgctgctggtggtgccgttgcccgtgacgggagccgccagcgccacggcggccgcggtggcggcgggcatcggcgtggcatggctgtacctgcaatgggcgccgttctacgcgaagctcgacgttcgcgaggccatcgcgtgcatcttctgcgccatggccgtgggctccgcgctcaaggtgcccatcgatctgctgccgcccgttccggcggccgtcgtgctcatggcgctgccgttcgcctcggccgcgctggcgcgccgcgcgcaacgcaagcagccgcccgcggagcgcgagccgcggatgttctatgaccagaaccccacgtccatcccgtggaagatcctgttcggcgtagcggcgtacagcctgatcatcggcgtgatccagggcatgcccatccaggccgactacacgccgttctggatgatgacgtccgcgcaccacggggccgagatcgcggtggcgctgtgcgtgctgtggtgggtgtttgcgaagggcggcctgctgcgcttttccagcctgtggcgcgcgatcctgctgttcacggccacggggctgttcttcctgcccgtcatcggctcggcatgggcgggctgggcgctcgtgctcatctccatcgcgcagacgctcgtggtcatgctgttctggacgatgctggccgacgtggcgcatcattcgcgcacgtcgccttacgtcatcttcggctcgggctggatcgcctactcgctgccgttcgcgttgggcgagctggcgggtaaagcggaagggctgcacggcgcgggatctgcggtgctgctggcgttggcctacctgctgaccatcgccgcggtgttcgcgctcaacgaggcgaacttctcgcagcgtcgcatcttcgccgatttggaaggccccgcgcccgaacgctccatgttcgcgagcatcgacgagggctgcgagcgcttggggtcccagcggggcctcaccgcgcgcgaagtggaggtgctgcagctgttgtgcaagggccgctcgaaaagctatattgcagaaagcctgttcatcagcgagaacaccgtgcgctcccactcgaagcacatctacgcgaagctcgacgtccattcgaagcaggagattttggacctgatcgcgcagggctaggcgatccctgccaccttgccgtcccggtccacgaaatacgcgcccaggatcgcatcgcgctcgcgggcgaacgccaggccgcgttcgatccccaatgccagcagggtggtcgagtagccctccgcatcgatcgaacggcgcgccaccacggtggctcccgcggcatccgtctcgacggggaagcccgtcttcgggtcgaggatgtggtggtagaacacgccgtctcgctcgaagcagcgctcgtacacgccgctggtcacggccgaggcgtcgcgcacggtcacggcgcccacgatggagcccttgtcgcgcggatcctgcaagcctacgcgccatgggctgccgtccggcttctgcccgtgcgccatcacgttgccgcccaggttcaccacgaacgagtccaacccgtgctcggccagcagcgcggaaagccggtcggcgatccatcccttcgcgatgccgcccacatccacggccgcctgcgggtcggccagctgcgcccaggacccgccgggctctccggcttcgcttacgcgcagcgcgcgccaatccacatgcgccagcgcgcgctccacgtcggcgcgctcgggcaccgtgccctcgtggaagttccacagccgcaccgccgagcccacggtgacgtcgaacaggccctcgctgtcggcgcagtatccgatggccgcgcgcagcagctcggccgtgtcgtcgtggacggccacgcgcttgcctgcagccgcgttcagccgcgagatgtcggagtgcggcagcgtgcgcgaaagccgccgctcgaacgcgcgactcgcggcgcgggccgcgtcgaacgcggggacgcactgcgcggcatcagcgtaggcttgcagggtgatgatcgtgttgaacgcgtagaactggtgcgtcatcatgcccgcgtcgttgggcccgtgcgtttcgtgcacgtcttccagcgggatggggtcgtatgcgtcgcgatattccatgccgcacagtatatcacccggttcgtgtcatggcgcaacctgcgaaaacaccccgtccgtgtactgttgcgccacccgtttgcgccgcatcatgaacccatcgcgatcgaccggcgggcattccctccctgatcttcccgctcgtcagccgatcgcgatccggcagcggctgagcgaagggtcgcgccgcgacggtgagggaagcagacacaaccaaggaggagccatgatccagaacccgaacgaaatagccgcccgccagcgtatggaagaagccatgagtcgcatcgaggcgaacgtgcgcacgcgcctgcagatgaaccgtcgccagttcatctgcggcagcgccgctaccatggcgctggccatgctcggcctggccggatgctcgccgaaggccgacgcgaacggcaacgcgggcgctcaggcttacaaggcgggcacgtacgaggccagcgctgagggccgcaacggcgccgtcaacgtgaaggtcacgttcaccgacgacgccatcgacgccatcgatgtcgagcacgaggaaagccgcaacatcggcgacgctgccatcgatatcctcaaggacaagtatctccagtcgcaaagcctcaacttcgacaccgtcacgggcgcttcgctgtcgtccatggccttcgccacggctgtggccgagtgcgtcgaccaggcgggcggcgacgtgaaggccctcaagaaggccgacacgggcatcgagcccgcggccgccatcgacgaggactgcgacgtgtgcgtcgtgggctccggcggtgccgcgttcgcggcggccgtcaccgcggcggaggccggcaagacggtggtcatgctggagaagatggacatctacggcggcaacacgaacgccggcgagggcacgctcaacgcgcccgaccccgagcgtcaagagcccctcggcatcgaggattcgcctgacctgttctaccagcagacgttcgaaggcggcgacgagttgggcgatcccgcgctcgtgcgcatcctggccgacaacgcgttggacgccgtgcactggatggaggaccacggcctggtgtacgagaaggaaccgttcacggccatcggcggcctatggcagcgcggtcacgccgtcgaggtggagaagaagggcgagcagggcggcagctactacgtgtcgtgcctgaaggacagcgctgacaagaccggcaaggtcacgctgtacaccgacgcgaaggtcgaacagcttgtcgaggagggcggcaaggtgacgggcgtcgccggaacccgtccttcgagcggcgcttccgttgccgtgcgcgcgaagtccgtggtgctggccacgggcggctactcccgcaacgccgagctggccatggagtacgacaagcgcgtgacgaaggacatgccctcctcgaatgtgtgctcttccaccggcgacggcctgggattgggcgaaggcgtgggcgcgggcctgcgcaacatggagctggtgcagatccacccgctgggcgacccgcagaacggtggcgtggccacgttcgtaggcaactggctaggcgtcgaggactacgtgatggtcaacgacgagggcaagcgcttcatccgcgaggacgagcgccgcgacaccatcgccgacgccatcctggaacagcccaacgacgagatgtggctgctcgtggactccaccgacatcgcggccgaccgcgccgaccagatcgccgagctggtggagaagggccacagcttcaaggccgacggcatcgaagatctggcgaaccagatcggcgtgccggccgatgcgctggccgagacggtggaggggtacaacgcctgcgtgaaagccggcgtcgacacgcagatcgccccgggcaaagagctgctgggcaccgagctgtccgatcccgcgtactacgcctccaagcgcattcccaccatccactacaccatgggcggtttgtgcatcaccactgatgcgcaggtgtgcaccgaggcgggcgagcccatccccaacctgttcgcgtgcggcgaagtcaccggcggcgtgcagggcggcaaccgtctgggcggcaactcgttcaccgacctcatcgtgttcggccgcatcgccggagcctcggcggtggcgaacgcctaaaggacagcgttcctatcgcggattgcgtttcatctgcggtcaagaaggtcggcgtccgtgcaagggcgtcggccttctcccgttcggcgctactttcccgaggcggcgcgcgagagcttcagccgagccagctccgattgctccgcaacggtgcgaagcgcctcgtcgcggatgtaggcggaatcgtcgacggtagaggctccgcaaagaagcgtagtcaaagctttggagatgtcgatgaggcgcttgttcagttcacgatctgcgggagtgttcatcagcgtcatccctttcaagtccggtggttcgctcgtggtatcatctagtgcgatcgttgaagatcgcgtttatgcgcgcaatggcaatgagaggcttccattgcgtccggcggtcacgatatgctccgatcggctgatattcatgacggcggctcttttccgatgatcgtggctctgcagtaatcttaacgtcagacaatttatcataaaacattaaatctgtgatggtggcttcgccgttttgttccgactgaatgcccagatggactgcaaaattcctaattgtaatcatcggattacgcaacttgtcgcaccggtatttcagaagccccctagcagcaaggtttcattgaatgctagtatgcttttgtaagcgtggagagacggttttgcgccatgtttgttcggatgcatcgatcgtacgacgaggggctgggtgtatgaggtttaccgaagaggtagttctgttcgacttcgcgggaatcccgatggtgggctgcctcgataccggatatgcgatcggtttgaccgagcggggcgctgcggtttgctcgcgcatgctcgaggaggatgttcccgaggacgatgtgaccgcggtggatccggcgttgctggaacatcttgcgcgcggcggcttcttccagcgggtcgttgccgagccgcgcgtgctttcggcgtacctgcacgtcacgcagcgctgcaacctcgcatgcgcaggctgctactcgctagacgagcatcgcaaccgcctggccgacgcgcctctggccgacatgaagtgcgcggtggaagggcttgccgccgccggattgtcgcagctgatcatctcgggcggcgagccgttcttacgcgaggatcttcccgacatcgtggagcacgcgaagcgcgcctgcggcatcgcgtcggtcaccgtgctgtcgaacggcacgcgcatgaccgaggaatcgctggagcggctggcgccgaacgtcgattgcgtgtcggtgtcgttcgacggctgctcggctgccgcgccggcgtacatcagaagcgagcagcgcttcgacgagctggtggaagccgtgcgcatggtgcagcgtgcgggcatcccggcgcacatcattcccacggtacatgcgaagaacgtggacgatctggccttgtacgtgcagctgtcgcgcgatttgggtgcgtcgctgaacttcagcctgcttacctgcgagcctgacgacgaggtgttgggaggcctgctgcccggcgcggacgagctgcgcatgctgggccgcgcgctgctgacgcttgacaacggcaagccccttcccgcgatggatgcgcccgtaggcgtgaacctcacggtgaagcgcaactgcggggccggctgcaagtcgctcagcgtagacgccgacggcaccatctacccgtgccacatgctgcatcgcccggagcttgccatgggcaacgcgttcacgggcgccgtgctcgatgcgttgcagacggatgtgtctcgcacgttccaaacgctcgacgccgaaaagttcgaggactgcggatcgtgccggtatctgcgaatctgcgggggaggctgccgagcccgctcgctgttcgaatcgggcaatttggagtcgaaggactcctactgcctgatgacccaggcattctacgacgtcctgggaaaagccatgtcagaatcgctacaacaaaggaggtgaaagaatgctgttctatagcgacgcggaacctttgtctgtgtgctatcccatcgggtttaacggttcctgttttgcggtgggtttctgagtaaacagtaaaccccatcgatgtatttatcaaagacctctttcattaggtaatgaaagaggtctttgcgatactatagcttttatttgtaaggtgctctgggagaaggagacgtaatgcctgacacggatgtggaaacaacggaacgtttacttgttaaaactcgcaagatatgtcgtcttatcggtctcgccatgattgtcgtctttgtcttcctttgcatttggtggctggcatcaagtggggtaatggtttgttctttgttcgatcccggtttctcagataaccctgttaatgggtttacgttagttaactatgtgttgtgtggtatcgctatggctgcgatatgcatcactcttattaaaatattctccgatacttcaaaaggccattctccctttactatgctgcaagttaaaaggcttaggctgattgcgatctcgttgctggcctatggtgttcttgagtttgtaatgacgtgcagtgcggcttttatgaatcaaggatgggcgggttcttctgcgggtagcgtctctccaactctgaacttctttcctttagtggcagcggcggttgtcttcgccttctcctttgtgttcaaatacggcatacttctgcaaaagctttcggacgaaaccttgtaggtgggctcgatgccaatcgttcttcatcttgacgagatcatggcggatcggcatatctcgctgaacgagcttgctgacaaggtgggaatcaccaacgtcaacctctcgcgcatcaagacaggcaaaatcagggccgtccgtttcagcacgcttgacatgctgtgcgaggtgctcaaatgccagccgggagatatcctcaaacacgtttccgccgacgaggcgaacgccatgttcatcgacgagaatgccgagctgtaaatcccgttcgtgtgcattttgcagatcgtctgcaattgccatttgacaaatgcctccaagacaggcagaatattgccccgcgcaataagcgcactacccgtggggatgtagctcagctgggagagcatcacgttcgcaacgtgggggtcgtgggttcgaatcccatcatctccaccacggaaactagatcggggcgaggccaacggcttcgccccgatttttctgtaatgggtggcgagagtctcggaaatgtggtataaaatatctggtcgctaaggcggcttccaagtgccgggggatgtcccccggctatttttgtcttaggggttattgaagctggggggatgcatgttgaatgagttgtccttgttcgtggacgaaagcggctctgaggggaaagggtcgaagtactacctccttactcttgtgtttcataatcagtccaatgacatccttaataacattgcagcttatgagcaaaccctcaaggacaaaagccttcccgacgtgccgttccatgcctctccgctgatgaatggaaacgatgaatacgaaggctttgatatggcgactcgaaaaaagctcttagcggcttttgcctcatttgttcgccgacttcccatcgcctataccacgtttctttatgagaaaaagctattcgatactaatgatgctctagccgctagaatgcgtcgtgatgtagtgacgtttcttttcgaccacttagagaggtttcagtcgttcgacattgtcaaagtttattacgatgacggccagaagatcgtctctcaaactttacgttcggcagttgggtatgcattagcaaaggactctgttttattcaggagttgcgacgttactgcttatcggctttctcaggtcgccgatctcctttgcaccctagagctcactgcgcataagtacgaaaacaaagaaagcactcctaccgacgagaaagtgtttggtggatcgatcgcgttcaagaacaactatttaaagaatgctcggcggaaaagaatgaactagctggccgcttttcgttcaagtaaatgccgtgctttaggaaagggctgacacgtgagatgttttgaaggaactttagcccagcaggctttttctcagatgcagaaagagattcgcaaggagatagaaagccttccggatgaaaggttcacaaataccgagcaagaggcatggatagagtatttcgtttccaagtacgaggtagatccatttgagatcaatgaagatgggatcgaatactctatagacgaacatgatatccgggtctacaacacttggcatagcatgatttcttatgaacctgagtatttactagtccccggtctttctgttgtgtgccgggttccatttgtcggcgaatctgacttgctgaagttaactccaaacccccatacgttagatattttcgaagtcgataaaatcgtggaaggaaggaatagcgagactgcccacctaatcttaagtgaggaaatgcgtcaatctgatgcaagcgccgatgcaattcaaaaacgcttttcaggcagggtttcaagtttaaaagaagaagtttcaagaaacaatgcagaagccgttcgctttaatgccgctcttccaggtttggtggaagaatctatcagaaagagagcagatcagctcgatcgtcttcatagcctaaaaagagagctcaaaattcctctaagagccaatagagagactgctcccattcccattaaaaagaaaaaacttgtctttcccgcccctaagccatctgaagacagatcgccaagctatgcgatcaaggacgaagactatgaaaatattcttgatcttatcgataaacaatgtagcacattcgaactgacacctagttcgtatagctcacttggagaagagcagctgagggatatcgttctcgctatgctaaacactcactatgagcagatggctaccggggaaacttttagaaagtctggaaaaactgatattagtattcccttcgaaggacatgcggcctttatttccgaatgcaaaatttggcatggagaaaaagctctaagaaaagctatcgatcaactttttagttattcgacatggcgagatgtgaaagtctctcttatcgtgtttaaccgtgataacaagaattttccgtctttacttgatgcgattgattcgatggtgaatgactatggctataaggttaataagagaggcgagagcagctggcgattctatgccacgaacaaggagaacgagcagcttatgcaagttactatccaggcgtttgatttgttttgctaaagttgcatgtggttttcagtgtgtcgatagccatgggtagctattcgttgacacgaaggacacatcaccgcttttagctactaaatcaattgtgatcgtttacggatgagctgggagcccgaatggtacctatagcatcacgctgcgtatgaacgcgaagcgtactattaccacagaagatcatagattcgacccctcatagctgtcacgaaagcgcgcgcggggcaggccgcctgtctccgcggtttcccattcacggggtatacttctctctgacctgcgatttgataccggaagttgtcatgctgtctgcgaaaaagaagccggaagttggttgagcgtgggccggggtgcccgcatcatagggacatcgaccgcacgaacgaaggatggacctatgagctttcgcgacaacatgcagcacttgcgcgccacgcgcaacatgacgcaagagcagctagccatgctgctgggcgtcagccggcaatcggtgtcgaaatgggaggccgagcgcgcgtatcccgagatggacaagctgctgaagatgtgtggtctgttcgaatgcacgctcgacgagttggtgacgggcgacttgaccggccgtccggccaacggggccgccagcattccgccgggaaagtcccagcaggacgtgaccgggtacgatcaagccatgcgcgttttcgcgtggaagcttccgctgggcatctccgtcatcctcgcgagcgccgcattggctctccttctgtcggatcccgggctcatgccgatagccgaagtgaggagcttcgcatccgcgctcgtgttcgtcggtgcggccgtcggtctcgcgctcatcctccctgcatcgttcgcgcgcggcgcattccgcaaggcgcaccccttcgtcgacgacttctacacggccgaccagaaaagcaaagcgcgcaccgctctgtcgacagggctcgtcgcgggcatcggcctgctcatggcggggttggccgcgaccatcgtgctgcaagcggacgtgtggctcgcaagcgcgacgttcttggcgttcgctgcagtcggcgtgttcgtcatcgtgcggagcgcgcttttgggggcgcgctgcaatctggcgcgttacaatcgcgcatcgctcgggggcatgagcgaggagcagatcgaggctatgggcgacgacggccttgccgagcgcgcccgccgtgccaagcgcgaacgcggcacctacgcagccgttatgcttgcggcgacggcggtcggcctggtgttgatgttcacgccggcgagcaggctgttcctgctggcatggccggtcggcggcctcgcgtgccttgcgatcaaggcgttccgttccgcgcgaagcgacggttaggcgttacgcgaggttcttcgaaggaacggctgcgcatcgaagcgtgtcaaatcgcacgtccctttgacacatctgacacacctttagcaactaacaggttcgaccagggcgaagctcgcccctggcgcgccattcccaaaatcggttctaaggagagcacatgagcacgacgatcgtcgcacgagaggtgaagaaatcgttcagcatcgggcgcggaagcaagcgtcgggtcgccgacgtgctgcgcggcgtcagtttgcgcgtcgagtccggcgagatggtgggcattgtggggcccagcggatcggggaagtcgacgctgctgtactgcctgtccggattggaggcggccgactcgggctccatccagatgatgggcacgcagatggtgcatgcgggccgcaacgcgctgtccagaacgcgccgcgaccacgtgggcttcatcttccaatcgtacaacctcatcccgtcgctgagcgcgggggagaacgtttcgctgcccgcgcgcctggcgggtcgcccgatcacgaaggcgcagacgagtgcggtgctgaaaagcgtaggcctcgacggcaggggaaagagccgccccggcgacctgtccggcggcgagcagcagcgcgtggccatcgcccgtgcgcttgcgggcggcgcggacgtgatcttcgcggacgagcccacgggcgcattggattcccggaacggtcgcgcggtgctgagcatgctgcggcgtatcgccgacgatccgaaacgttcggtggtgatggtgacgcacgatttggaagccgcgtccatggcggatcgcatcctggtgctgcgggacgggcaggttgcgcgagagatggggcgctcgacgcccgctcagatccttgcagcgttggaagacggggaggtgccggcatgatgcgcttggcgttctcggatctgcgcgatcacgccgccacgtggatcggcgcgtttcttgtggccgtgggctgcggctacataggtggctgggcggtgtcgatcgaagcttctgctgaaacgttcgacgtcttgcgcagcgtcggctccgtcgtgatcgcgttctcgtcggttgcggcggtggctgtgctggcgttgacggccaatcttaccgtggacacgcaacggcgctcctatgctctatggcagttggcgaacatgaagccaaggctcgtgagcgcggtggtgctcgtgcagttggtagttgttgcggtgctgggcgccatatgcggcacattgctgacgaccataacgttccctcctctgttcccgtgggtattcggcgcgcgagtggagtacgcgcaggcagttcctcgggtgggcgcagcgttgatgccttttgtgtggctcgcggtggcgggcacgttcttgtgcggagggctgaagggcgcccgcagcgcggggaggacgtcgcccctggctgtcttgcgcgagtcgaaaccgaggcgcgcgggaatgacgtggatgcgcgtcctgctgtttgcagggttggcaatcggcgcttggcaggttgccgccatcatgatcggctccgtacccggggtggtcatgaactggtcgctgtacctgcccattttgacgacggcgggaatcgccgccgtcggtccgcttgcgttcgcggcgattttgaaggcgtggacgtccgtcgttccgcagtcgcgctggaatgcgtggtacgtggcgcggcacaccgctcgtttcggcctgagcgccagcacctcggtcgagacgcccatcatggtcggcttcggcttggtggcgggcatctactccgtcatgagcatatgggcggattattcagggcagcacggcatgaccttcaccggcctcgattggactgctgccatcctcatgctcggcggccccgtcctcctgtgcgccatcggggcggcggtcagcgtggtcatgacgtcgaaatcgcgcacccgcgacgtggcccttctcatcgccggcggcgcgcggccgcgcacgctgctggccgcggccgcgtgcgaggccttcatccatgccgtcacggcaacgctggcgggcatggcggccgtggccgtctccaacgtcgtcaccgcgtacgctgtcggcatgccgctgttcgacgggttggctttcggagagggtctggccgtctcgctcgcgggcttcgtcctcgtcctcgccgcgacgctcgtgcccacgctcgccgcccttcgcaaagagcctgcaaccgtcctcgcgatgggggagtgagtcgcgggacgtttcaggattggtcttcggcggccgcttcggaaggctcgcgacggaatcggcgcaacagcggaaggggcagggtggcagagaatgcacgctatgcatgatttgcaggcgctttccgctgtgatctatgaaagaaaccccaggtcgtcaaaaaaaggcgataaagaaaatcgtgcatagcgttaaatctcttccatgcgggaggcgacccgctgctgatccggcttcggcagcgggccgttcgagcccctcctgccttgcggtctgcttgggtcggcggctgctgcgggaagttggcaaacccgtgccaatgtggccgcaggttcttctttaccattctgacctgcgaatagttagatagggtttttccctaatggggtggtgggaatccccgaataccctcgtttctcgtgcattccgtcaataaaagttgtatattttgtgaaggagagatcgtcagtcgaagggaggagattgtatggttaagaccaagaggaacaaactcgctgtctggaccgcctccgtctgcgcattcggtatggtcatggggctggttgcatgtgcgccccaggctaccgaagacgctacggaacagaaggcagatgagaacaagacggtgcagcaggtggaaacgcctgagcccgataagtacggcgtcgtcaccgccgagtcgtggaaggacgcgtatccggaccagtacgcttcgtacatggagaacaagtccaacgcgcctcttcaggatggcggcgacaagcacaattatctggagctgtacccggctctgaacaccatgtacaagggttatgcgttcgcgctcggctatgacgaggcggccagccatctgtacacgctgcagagcgtgaaggaaactccgcgcaccacgcagaaagagcagctcgccggctgcatcacctgcaagaccccgcagttcaccgccatggtgaacgatgagggagaaggcgtgtacaaggagaagttcaacgacttgatcggcgagttcaccgagccggtcagctgctacaactgccacgagaacgatcctcagtcgctcaaggtgaccggttcgtacttcgtgaaggcgctgggcaacgacgcgggcgagggcagcaaggccccgatgaactcccaggtgtgcggccagtgccacaacgagtactacttcgatggcgagaccaaggccacgacgaacccctacacgggcctcgatcagatgaccccggacgccatcctggcttactacgacgagcgcaacttcaaggattggaaccacgctgacacgttcgctccgatgatcaaggttcagcatcccgagttcgagaccatgcacggcggcgagcagtccccgatggccaaggccggctacggctgctccgactgccacatggctcccgctgagggcgcgaacggcgagtacacgtcgcataactgggtgagcccgctcgagaacaagcagctcatcgagaacgactgcagcaagtgccacgacgacctggagaagaaggtcaaggacatccaggccagcgaggaagagcgcgtgaccgcgatcagcgagaagatcgaggacatgaccaacaagatcgctgcgaagtacgctgacgagatcgccgccatgaaggctgcgaacgaggcaaagaccgatatcccggctgcgtccgaggagcttgccaagctgcagaagcttcagcgcaacgcgcagttctactgggatttcgtgatggttgaaaacagcgagggagcgcacaattccaagctgaccaacgagacgctcgacaaggccgaggctgctgccgacgaagccctggcgatgctcgcttagccgacaacgacgttctctccaacgtctttagaggggtggggaaaggaagcctggcttcctttccccgtcttagggtccctcgaccggcttgatgcattgtttttgccgaaaaagggccgaatcacacgaaaaacggggtgaatccgggctaattccccccaaatgggtgataggttttttgtcggttgaccgctagtatgcatgtggtaaagtgcttgtgtttccgtttggcagcgaaatcgatgccactttgtaacggagacgacggaaatgcaagacgagatcatgagaaagggggttagagagcatgagcgaagaggaaaccaaagtggaagccgccactgaggcacctgcgaccgagggctctacgaccgaggaagccgctcccaagaaaaagggaaagaagtggccgatcgtcgtgggcgtcgtcgtggttgtcttgattgcagccggtgccggcttctgggtttggcacgagcagccgagcttttgcgccgccatctgccacacgccgatggacgagtaccttgagacgtacgagcaggagcctggtaccacgggcgtcgacaagtggggcaacgaagtgagcaacacgaacgcgatgctggccgtctcgcacaaggcccagggcaaggactgcatgtcttgccacgtgcccacgctgagcgagcagatgtccgagggcatcaactgggtcaccggcaactacgtgtacccgcttgaggagcgcgacacggacatgctgaccgaggcgcgcggccttgacggcgacgagttctgcctgaacgagagctgccacaacctgacgcgcgacgacctcgtgaaggctacgagcggtatggagttcaacccgcacaaggcgcagcacggcgagatcgagtgcagcgagtgccacaaggcgcaccgcgcttctgtgatgtactgcacgcagtgccacagcgaggccgaagtgcccgagggctggctgacggttgccgaggccaacaagctttcgactgcggcgtaagccactgacagcaccaccgctcgttcgcgagcaaagaaccgaataagcaagagggagcccgccgaagcgccatcgtacgcttggacgggctccttttgtcaaaggtccgaggaacgaaatggtggccctgcgaatgcgagatatgcaggaggcttccacgccgaggcgccgcgcatggtaaatctttgaattcggcgccattgcgctcctcggaactttgaggtacgtgaaaatgacggttggagagaggcaattgaggaggcgagcgtgaacgcgaaaacgaagcgtcgcatggtagtggtgaccggcatcatcgtcattgtgctggtggttatcctagctgtagtcggcggtacgagctcggcgaagaccgtgtcggtggcagaggctgcgacggggagctatgcggatcagaagatccaggtgagcggcaacgtcgtcgagaattcattcgcaaccgaaggcaacgtgctgacgttcgacatctacgatccgaacggggacatcacccagcagctccgcgtgcgcttcgagggcggcgtttccgccacgttcggcaacgacgtgacggccatctgcacgggcaaggtcggcgaagacggcgtgctcaacgccagcgagctggtcacgaagtgcccgtccaagtacgagaacgccacgaacgcgttgacggtttcccagttgacgggatacggcgacgaggtcgtcgacaagccggtgaaggtggccggcgcggtgaaggacggcacgctgaaggcggcgggcgagggcgaccggttcgtgctcgtcgatcccgagaacggcgaagagcttgccgtcgagttcaacgacgcgatctcggaggaagtgaaggacggctcttcgctcgtcctgaccggatccatgaacgcgcagggcaagttctccgcaaccgaagtggccctcgaaggctagaccggtttctacaaacgaagggcggtcgcatagccgccccgaaaggatagtacatgccaactataggtttgataggagtgctcgtcgcattcgccggcgtagcggtgtccatcgtgtgcctggtcgcgggagccctgttgtcccgcaagaagtcgggcggtgcaggcgagacgctgacgtggggcgggcatgtggccgtgctggtgacgctggcggctctgaccgtgtgctgcggcgtgctggtgtactgcttcatgaccggcgataccagcatcgagtacgtgctgcgctatcgcagcgactcgtccagcgacatcgcctggctctacaagctgtcgggtctgtgggcaggccgcgaaggctcgctgttgttctggggttggctcatcgccatcttcaactcggtggtggccgttcgcaatatgaggcagggcaggaagctggattctatggcgctgctcgtgtcgcagctggtgctggcggcgttcgtgggcgtgatcctgttctccgaaagcaacatgccgtttgcggctacgcccgccaagtacttcgacggctcgggcaacctgacggctgcagcttcggtgctgggcatgaacacgctgctggagcactgggccatggccatccatccgcccactttgttcgtgggctacgcgggtctcaccatcccgttcgcgtacgccatcgcggctatcatcgtgaacgattcttctaaggaatgggtcgtgcgctcgcagcgctacacgctgttctcctggttcttcctgggcgtgggcatcggccttggcgccatctgggcgtacgtcgtgctcggctggggcggctactggggttgggaccccgtcgagaacgccagcttgctgtcgtggatcgtgggcgtcgcgctcatccacagcttcaccgtgtaccgccagcgcggcgcgttcaagcgctggtcggtcatgtgcgcgtgcctgaccttcgcgttcgtcatcgtgggcacgttcatctcccgttcgggtctcgtgcagtcggtgcacgccttcgagggcgatcccgtgtcgctcgcgctgttcggcgcgctcatcggtgcgtccatcctggccggcatcgtgggccttatcgtgcggtggaagagcttcggcccggcctcctcgggcgccgacgacgtggagaacatgctgtcgaaggacgccgcctactacttcaacaacgtcatcatggtggtgttcgccgtgctgctgacgtacatgaccgtgtcctccgcgttgcccgcgcacctgttcggcatcccggtgccgttcggcggccagacggtgtcggccggcacgtacaacgccatcgcccgtccgctcggcgtgatctacctggccatcctggccgtgtgcccgctgctttcgtggggccgcaccgaaggcaagcaattctggaagcgcgcccgcatcccgggtatctgcgccgtcgtgctgttcgccgtgctcatgttctacttcgtcacctacctgctgcccagctacgacgccatcctggcggcgggcggcaccgaggccgacggcctcttggagcagggcccgtcgtggtactacaacggcgtggccgtggtgggcttgctggtggccagcctgctgttcttcaattcgctgttcatgctgggccgcgccatccgcggctaccagaaggggcaccaaggcaacgtgctggcgtccgcttggggcatgctggtgaaccgcgcgtccacgttcggcggcttcgtcgcccacctgggcatggccgtgatcctcgtgggtctcatcggctcctcgatgtacgtgaccgagaagacgggctatgtgaagtacgatgaggaaaccgactcggcttccgagcctttcgtcatccaagacttcgagctgcgttacactggcaataatatcgctccgcagccgaacgacgatgacatcctatacaccgtgtacttcgacgtgtacaagaacggcgagttcgtcggggccgttgatccgacggtgcagttcgtccagtccacgcagcagcagaagctggtggccagcgtcatcacgttcccgactgaggatctgttcgtcgtgtaccgcggcgtgaactccgacggtgacttctcgatggacgtgcgtgtgaatccgctgatcctggaagtgtggatcggcttcggcctgctgatggctggcgtgctgatagccaccgtcggtcgccgtggcgcgaagcgcaagctggccgacggcaccgcggcgcctgccgacgcggatgcggaggccgaggtcgagaccgccgagaagcccgaacctgagaaagtcgaggcgtaaagcgccatggaggccgttgtggaacctgcgatcaagaccaagaagctctcgaaagtgttcggcaaccgccgggccgtcgacaacgtgtcgatcgaggtgccgcagggcgcgttcctgtccattttcggtccgaacggcgcgggcaagacgacgctgttgcgtgtgctgtccacgctgtcgcgggccacgtcgggctcggccacgctcatgggcgtggacttgaaggaagatccggacaaggcgcgcgaccacataggcctcatctcgcacaactcgatgctctaccccgatttgacggccgagcagaatctgatgatctacgcgcgcctctacggggtggtcgaccccgaggcgcgcgtcctcgagctgctggaggcggtggagctgaaacaccgccgcctcgacgtagtgcgcacgttctcgcgcggcatgacgcagcgcctgtccatcgcccgcgcgctcatccatgatcccgacgtggtgtttctggacgagccgtactcggggctcgacccgcacgcggtggagatattcgacgacctgatcgaccagcagcgcgagggccgcacgttcgtcatggtcagccatgacttgcagaagggcttcgccatgtgcacgcatgcgctggtgctggcgaagggcaaggtggtggcgttcgacgagaaggacgcgttcgatttcgacgagttctcgacgctgtatcgctcgacggttggcatgggggtggcgtagatggcggtcgagctaaagaagccctcgaccttccagcagtacaagacgctgctgcgcaaggacttggagcaggagttccgcacgaaggagatgctcacgtccatgggcatctacgcgcttttggtgatcatcgtgtacggggcggcgctggcgcagacctcgcagaccaccgacgtgctgcagatgagcggcggccttctgtgggcgctcatcgtgttcacgtcgcttttgggcctgaaccgctcgttcgcgcacgagaaggagcagggctgcatggagggcatcctgctggtgccgatggaccgttcggtggtgttcctggcgaaatcgacgtcgaacctgctgttcttgctggtggtggaggcgatcgccgtgccgctgttctacttcttcttcctgaccaccaccacgccgtccgagagcttctggttgctcgtggtgccgctgctcgtgggcaccgtcggcgtggcgggcatcggcacgctgctgtccaccatcaccatcaacacgcgcggcaaggacgtgatgctggccgtgctgttcatcccgctgatcttcccgcttctgtacgcatgcgtgtccgcgacgacggcggtcatcgtaggcgcggaaggatacgcggacatcatgctgacgtcgttggcgcttgcgggcggctacgatgtgatcatgatcctcgcatcgtgggttctgtacgatttcgtgattagcgcttgatgttccgtcggcctgccggccgacggaactgctcgatgctgcgaggcgccctggcgccgaaactcgccgcttttgcgcttgcccttgcgtgcgaaagtacgcgcggccgcgcaacacggcgattttcagcaccaggacccttctcgctgactttggttggacccgtgacagaaggagagtaatgactgagaaaacgaaaaaggcgctcaagctgccggaagcggggcaatggcccgaccggatagcgccgacggtgctcgttgcgggcgccgtgctgtcgacgatcggctttttgctggcgttcctgtgggcttcgccggtgaacggtgccgcggtgaacggcgtcgagatgatcggcggccagatggtgaccagcgtgctgctgttgtcgcagaagatcttctacttccatatgccggtggctatcacgtcgttcatcgcgctggcgttcgcgggctattacgcggtgcgcttcctcatgacgaagaaccgccgcttcgacacctgctcgaagatcgcgatggagatcgcgctgctgttcgtggcgtgcacgatgatcacgggcgacttgtggacgaggttcgaatggggcgtgtggtggacgtgggatccgcgcctgacgacgtacctcatcctcatgctcatcatcatcgcgtacttcatcctgcgcaacgccatcgacgagcccgagcgtcgcgcgacgtacggggcggtgctcagcatcatcgccctcatcgacgtgccgatctgctttatggtaacgcgcctgattccctccagcatccacccggtggtcgtgcgcgagggcggcatgtcggccgatatgggcatcacgctcatgttctgcctcgtcggcatcatgctgatcgggttcgccctgtaccgcttccgcttccgccaggttcgcctgaccgagcgtgtcgaagcgctgaaggagcagttggaagactgagggtccgccgttctgcgaacggcggagcggggcgatctcgggcactgcggaagccctcgctgaccttgctggacctgtgggatgttcgttgttgataaaaggagaaacttatgaatccggttctcgtagagatatacagcaccatcgttccgtcgatgccgttcatcatcggagcgtacgtgctcatgtggttggctattctggtgtacatgctggtcatcacgctgagctacaagaaggccgagaagcagatggcggttctggaagaggccgtcgcggaactgcaggcaaagtagcaggatggcgacgggttttcccgtcgtgctacaataaccgaacaccatggacgaggcgccgcttctgcggcgcttcgcgcacgttacagagaaaggtatgcccatgaaggctctcattcccgctgccggcctcggcacgcgcttcttgcccgccacgaaggcgcagccgaaggaaatgctgctggtagtcgaccgaccggccatccagtacgtggtggaggagggcctcgcgtcggacgccgacgaggtggtcatcatcaacagccgcgagaagaaggccatcgaggatcacttcacgccgaacccggagcttgtggagctgttgcgcgcccgcgggaaggatgcgtatgccgacgcagtggagcgcgtgggcgactacaacgtgagctacgtgtaccaggacgaggcgctgggcctggggcatgcggtgcgctgtgcgcacgagaagacgggcgacgagccgttctacgtgctgttgggcgacgtgctggtgcccgacaacaagatgctgccgcgcatgcaggaagtgtccgacgcgcacggcggcgccagcgtcatcgcggtcatgccggtgccggacgaccaggtcagccgcttcggcgtcatcgcgggcgcggccgtggccgacgacgtgtggaagatcgacgcgctggtggagaagccggcgttggaggacgcgccgtcgaacctggccgtcttcggccgctacctcctcagcgctcgcgtgatggagcttctggccgacgtggagcccggcgtgggcggcgagatccagctgaccgatgcgctggacgccgtgctgcgcgaggaggagatgtacgcgctgattatcgaccccgccgacggcttcgacaccggcacggtggaaagctggctggaaaccaacaacgtgctgttcaagcgcgcagccgaatagcgagaacaaccgtcgccgagcgtaacggagcgattgcgaaggcctgccgtcatctggcaggccttcgaatagtataatgtcctcgaaaaagcgtatccggcagctggaggtgtcatgaggcacgcgcgcggcgaaagaggcatgatcgggcttgcggctgccgttgcctccgtggtcatcgtcgccgttatagggggagcgctgctcgtccacgcgtactcggacacggttcgcaatcttacccgcaaagacagcatcggatacttggctgatatatccagccagatcaccgagaacgtgcgcacggtcacctctcagatattctcggcgatggaaaccatcgaacgcggtcagatgacgttggtggagaacggcgccacgctcgacgagctgaacggagaaatggccgaggatagggatcggtggaatctgtcccgccttgcttatgtggacgaggacggcgggtggtacttcgccgacaccacgcagcgctacaccaggtcgcaggactatctcaacaagacgttgcttgaaggcaaacgttccatctcgggtatcgagaccatggacggccaggatgtgctcgtgttttcaattcccgtgaacgcggtcatcgatgggcatcacatgaaggcgcttgcgggcgtgtacggggtggacgagatgctgcagctcctgtccatcgattcgttcgaagggagaggatacgcctgcatcgtcaaggacgacggttcggtggcggtgcgtcccgaggatcaaacggccatcagcggcgagtacaatatcgtgtcggctttggagagccagaacgccgatgacgaagagccggtccacgttctgcgggcggggctcaaaaaaggggagcaaggcgtcgtacttgtgaagtacaacggcgtcagttcgtatttctgctatacgcctgtgggcgtgagcgattggcatctgctgtccatcgttcccagcgattacgtcgatcagaggacgaacagcctgtatctgctgaccgtggcggtgggcgttacggtggcgttggtgttcggcgtgatcatgctgttcatcgtgatcgtgcagcatcgcaatcgtcgacggttggaggctatcgcctacgtggatcctgttaccggcggagacacggccggccggtttcgcgagcgctattacgacgtcgtccgaacggatccgcgtaacttggtgctcgtgtacgccaacatagccaaattcaagtcgtacaacgatcgcgagggcaaggagggcggagaccgtctgctcaggtcggcgtacgacatgatagagcggcagctgcgcgaaggcgagttcgcggcgcgcgtctccgcagaccatttcgtcattctgttgcgcgagcctgacgaggcgtcgacaaaggagcgtctaaacgagttcaggctcacgtccgagagcgtcggcgagcaagtgctcgtgtcgatggacttcggcgcttacatattggacgacgatgcgctcgagcaagagttcacgcttgtgaccgatgcggctaacttggcgcgtgcgagcgcggagaagcggatgcttccaagcggcgcacgcgttggcttctatgatgatcgcctccgtcggcgcttccttcgagagaaggagctcgaggatcgctttccccatgcgcttgcgaacggcgagtttcatatgtatttgcagccgaaggttgcgctgcccgagcgccgcatcgtcggtgccgaggcgctcgtgcgctggatctctccggaaggtatgctctgcccgaacgagttcgttccgctcttcgagcgcgacggcgttatcgccgagctggatttctacatgttttgccaggtgtgcgctttgttgaagcgatgggagcgggaggggaggccgcttttctgcgtttccgtcaacgtctcgcgctcgaacttcgacgtttcggatttcttcgcgcgctacgagcgccatatcgccgagaaccaggttccggctcgctacctggaattcgagttcaccgagtccgtcgtgttcgatcgcaccggcgagatcaaccaagttattcggcgcatccacgcgttaggcgcacgttgctccatggacgatttcgggagcagttactccagcctcaacatgttgcgtagtctcgaagtggatatcatcaaacttgaccaggggttcttccgcggagataccgacatggacaaggcaaggagcatcgtcaacggcatcgtgggcatagcgcgcgacatgcgtatcgaaacggttgccgaagggatcgaggatatgggacaggtggatttcctcgagagcgtcggctgcaatgtggtgcaggggtacgtgttcggaaaaccaatgcctgccgatgagttccaggatttcaaactagacgatacgatgaggcgaaacggagatcgcggtgaaagcgttgaagagagccggtaaggcggcgaagacgttcgcgtcgatcgtgctagcggggtcgctggtcggcatcggactggtcggctgttccggcgaggctatgggcaatgcgtccggacgcgacgatgagatagtgctgacggtatcgaaatgccagaccaaggagctgccgcaggagctgttggacgagatgaccaatcgccaccccaacctgcgcttcgagttcgatacgtattcgaacagcaactattccgcgcagatcgtcaccgagctcgagcagcgcgatatccccgatatcctgatcaacacgcgcaatcaggatctgaccgaggatttggagcataatctggtggatctcgcggcgtacgatttttcagcgagtaccttcccagcgttctcgatcgcatgaccatcgacggcagcctctactatctgccgggttacctgacgcttgcagggttcttctacaacaaggaccttttcgccgagcacggctgggaggcgcctcagtcgctcgaggaactcattgccctcaacgagcaggcgaaggcggagggcatccggcttatggcgtactcgatggagctgacgggtcaacgcttcctgcagctgaccaatatcgcttcggcgcagtttctgcacacgccgcaggggtcgtcttgggaacaggattatcttgcgggcgaagcgagcatggtgggcacgttcgggcctttcatggacgagtatcggctttggctcgacagcggattgatttcggctgacgacctttccctgtcgaattcggacgccgcggagatgttcgcgaacggtgacgtggccatgatctacggcgttgccaacaacgtgaagaccactgatttcgacttcgatttgggccaagctccgttccttgcgagaggcgagggcgaagataacggctggtacctgtatgcggtcagctcgtactacggtattaacaagaagctggaagagccgggcaacgaggagaagctggccatagcgctggagatgttcgacctgatgagcacccccgagggccagagcatgttcacggatggcgcggaagggcgatatccggccacgagaaaggcggacggcgagctccacgcgccgcttttgagcgattaccgcaacgtggtcgaccgcaataaccttgtggagttggcggcttacactgcgccgctcttgctgggaggagaggcgctgggcgggtacatcgctggcaccgtcagcgccgaggaagcgttgcaggcctgcgacgaggctatgaagtccaacaagtcggaaacccagatcggcgacgtagtggcacatatcgaacgcgacctgagccgggaggagaccgtccgatacttcgccgacgcgttcagggagtacgggggcaccgacctgtgccttatgctgcctggcggcatggcagacggccaaatgcatccttatgggatttccggcaagctgtacgaaggggagctgcacgccaatgagctgaccgtgctcttgcccaatgcggggaagccggtgcctacgctggccactgcgcgcatttcgggcgaagacctgcgcgcggtgctagagagcgggcgcacgttcgagcggaaggacgcgtcgaaggaggcccttgctccgttccgctacgaggtgtcgggagccgaggtggactatgatgcagaccgcaaagtgcgatcgctcaaagtgaacggcgttgaagtcgccgacgaagacgtattcacggtgacgtatttcgacggggcggtcgaaacgtcccgcttgaccgatgcggcggtgtcggacgtgaagcccgtccccgcgttcactgcttgcaaggccgcgcgttgacgtactgccgcccgtcgtgcgacgggcggcagagtgaggtgaggccgggatgccgcggaagcggccgggttccgggacgcagtcgtacgcagccgtctaattcactacgttttgcggtgcaccctccacgaacgcgccgacgttagcggtcacggtagccagcaagcgttcgcgggcttcgtgggtagcccaggcgatatggggcgttacgatgatgttctggcctttcgcttgcagcaaggggttgtcgggttgcatgggctccaccgacacgacatcggctgcgaaacccgccagcttgccggatcgcagtgcgtccaccacggcctgctcgtccaccagcgtgccgcgcgcggtgttcaggaggtatgcgccgtccttcatgcggccgatggtctgggcgttcatcatgcggtcggtttcgggcgtggccggtgcgtgcagggtcaccacatccgaaacggccagcagctcgttgaggctcacttgacgcacgccatcgctttccaattggggttttgccgatcgattctcgaacaccacgggcatgccgaaagcacgcgcgattcgacatactgcctgcccgatgcttcccatgccgacgatgcccatcgtcttgcctgccagctccacgagcggcgtgttccagaacgagaagtccttggcgcgcgtccagtcgccttccatgaccagattggaatgctctcctacatgcaagcacagctccagcagcaacgcgaacgtcatctgcgccacgtcgggcgtggagtaggcgggcacgttcgatacgatcacgcccgcatcgcgcgccgcgtcgagatccaccacgttgtagccggtggaggtgagcgcgatcatcttgaggcgaggagcccagccgagcgcctcgacgttccattccgtcttgctcgacacgacgatgtcggcttcggctacccgagttttcagctgatcgcgcgacgtgcggtcgtacacggtgacggtgccgaaccggtcgagcgcgtcccagctcaagtcgccggggttgttcacctgtccttcgaggaccacgatgttcataggcgttccttcccgagaaaaggatcggcccggggagaggggagctccaccgggccacaaggaggggatgatgcggcacctattgggtgccgctctgctttaaggggtaagcagatgcaaactgaaaaggaggggagcctttcgtttgctgaagctattataaaagttgacattgaatatcatatgatgcacgagtgcatgttttgtgaattggaggccttgaaagtaacagataggtaaacatgacgcaaaaccctagggaaaaccctgacgcggaagctcgagctgattgtccaacggagcgccgggggtttgacggcgaaaacgacgtcaagcggtaggaatcaaccggtttggcaattctggcgagggcccggctgcggtgcttcgggcttgccgagcgcgatcaaaggcgtttccccagctcgggttctcgaaacgtcaagtgaatcactcggcgggattaccaaaccggtcgattgctgccaagaagcgggggtcttgccgtcgaaccgaggacgtcgcgggcctgtctggtccgtggtcggggatcgtccgaagccgtgcggttccacgtggagctgcagccgggatcccgccccaaaccgtggagtccctcttagtgtttcatgtgaaacgtttgtacgcgcatgcttgttcggccgccggggttcgccccatgctccgcccgccatctgcgctcgttcgcgcctatggcgcgggctcgcgctggcattccgtttggttcgcgcagtctgcctcaagcgtttcacgtgaaatgcttgtgcgcgtcgagcgaggccgtgggaatgccgttcgctgacaagcttgctgcagcgcggccctcggcggtggtttcgcggcccgcgggttctgcgggccgaggccgggttggccgcaaaatggctcccatgacaaaatcggcggctcggttgggcgtcggcggcggtaggcggttttcgccacctgcgattatgctggttggcgaggccgcgcggcgcgctggagccgctttgagattgtcatgggagtcgattcgcgtccaagccgcccttccgacggctcggcaatgctctgccgcacggcttcgccatacgatgtgctgcaaaaacgtcggtttggcagtcttcggcggccttcgatcgcgcccgacgctccttcccgaggatcggcgaggcgtaatcccagttcgcgctttgtcgccgcctcggaacgcaccgccagatcgggccgggactgccaaaccggcgtttttgcagcacataggttggcgttcgctgttaaaccgggattgacatagctcaggtcgacccgccccgcgaaaactcgccggcggctcggaagcccccttcggccatcggccggacgctcgtctcgcctgatcgctagctgtccgacagaggaagcggcatgcggcggtgcatgtcaatcctggtttagcagcgtaggttggcgaaatcgcgcgttcgcagcgagggacgtgactgggtgacggctcaggcggaggttctgccgctctgccgctctgccgctgcgtgggcgcgggctccatgcattgtctcggcgggttcgacgaagcgaggggcatgaaaacagatcggcccggggagaggggagctccaccgggccacaaggagggggatgatgcgacgcttgcgcatcgctctgcttctaagggggtaaagcagaggcaaactgaaaggaggggagtctttcgtttacagctgctagtatacgggtcgttcgcgcacatcgtatgatgcgggcgtgcgcgttttgtgaaacgatgggtcgcagagtaacggttcgttaacaaggatcaaaagagtcaggaaaagaagttttccgatgggcgccgcgccgcagaaatctggcgagcgaaaggttggcgaacggcattgcctcaaagcggcatcgacctgaagtaacatgttctacgatgatatgcgttggtcgatgatgcggaagcgggcgtgtgcgggtacgagaaacagatcggcccggggagaggggagctccaccgggccacaaggagggggatgtgcggcaccgaggtgccgccactgctttgtaaggggaaaagcagtacaaactgaaaggaggggattctttcgtttgcgagatcaagtataaaagtaagccttgaagaacacgtgatcgactcatgttcgtcctgtgaaatgccgcgaagcgtcggcgagcgtccatcttccttccttccgccgctcgaactgcgccgttcgcgcgaggtgcttccgtctcggtgtgcgcgagcgcatcggctcatttcgacggtcgcatgtcggggctcttttcggtatcatggatcacctgacgaaaggaactccccatgcccgatatcgcgcttcgttttcacaaggacatgctcgtgctgtcctcgccggttgccgttgtactggcccggcaagggttcgacgtggaacacgatctcgaatttgccaaccttgtggagccggaggcggtgcgcgatgcgctgcgcctcaacaagatggcaggcgcccagtgcctcgtggcgaacacggaaggcatcgcgcctgctcgtctggcgcatcgcggcatggaagaccgcgcggcggagatcgtgcgcacgggcttgtccctggcgcgcgagctgaagtcccagcacgtgctggtggagatcggcccgtgcggcctccccctcgatgccgccagcaaaagctcgctcaacgagaaccgcgaccagtacgcccgtgccgcccacgcctgcgatggccaggagttcgacgcgttcttcctcaacgggttcgccaacccagccgacctcaagtgcgcgctcatgggcgtgcgccaggtgagcggcgcgccggtgttcgcgtcggtggacgtggatgccgacggcatgctggccgacggtcgccatacgctcgaggatgcgctcgccgtcatggtggactacgaggccagcgtggtcggcttcgccacggcggctccgctcgatgcggccgtgacgttcgctcgccgcgccagcggggcggggcggctgccggtgctggctcagctgatcgtgcgcgagcataatccgaagcaaggcgacgttacgcacgagaacccgtattactgccccgatgtgctggtaggggcggccgtgcagctgcgtgcggccggagcccagttcctgcgtgcggccggtgccgccacgccggcctatgcaggcgcgctcgcggcggccagcgaagggttcgacgttgtgcgctcggatgtggaggagtagcatggcaggctctaacacggtgcgcagcccgcattacggagcgctgcaggatgtggtggattcgctgtacctcggactggggccgaaggagaagctccgccgcctcgacatcgtcgtggctgccgaggccgccgaccttcccgacgacctggccgagatcgtcaacctgctgccgcccggcagctacacgcgccagcgcctatgcgaccagctgaactcggctatcggcgggcatgcgtgggggcaggtgtacggcaccgtccaatagcgcgtggggcgaggccgctgcggccggcgggggcatcggtgcgagccgtcgttcgcggtgctcttctggcgaagctgctctccgcgtgcgcgcgtcgcctcggacgagctttcaacgttcgccttcatgcccgtggatatactgtgaatcgcccgccgcatcccgtgtgggtgttgaatctccacggttttacctcttgcatggtgggcgccgcgcgagtactatatgttcactttcctaacatcacctactactacatattgtggaaaacatggcgtagatcgtgtggaaacactgcgcataaaccaagcgaagccacagctcgcagcaggaaaacgacgaagcaagaagaagctcgaagagaggattggcagcatggtcgagaccatcatgaagcgcgacggccgaacggtggaattcaagcaggagaagatcgccgaggcggtggagcgcgctttccaggcatgcggggccatgcaggatcgcgcggcggccgaggatatcgcgcagcgcgtggtggacaagctggagagcggcgccatcgagggcgcgcccacggttgagggcgtgcaggatctcgtggaggagacgctcatcgagtccggcttcgtgcagacggccaagtcctacatcctgtaccgcgccgagcgcagccgctcgcgcgacgtgaacagccgcctcatccagacgctcaaggacatcacgttctcgaaggcgtcggattccgacatgaagcgcgagaacgccaacatcgacgccgacaccgccatgggcaccatgctcaagtacggctcggagtcggccaagcagttctacgagatgtgcgtcatcgatccgaagttcgcgcgagcacatcgtgagggcgacatccacatccacgacatggacttctacaccctcaccaccacgtgctgccaaatcgagctgaagaagctgttcaagggcggcttctccacgggccacggcgtgctgcgcgagcccaacgacatcgccagctacgcggcgctggcctgcatcgccatccagagcaaccagaacgaccagcacggcggccaggctatctgcgacttcgactacggtctggccgagggcgtgcgcaagacgtaccgccgcctgtacaagaagcatctggccgaagccgtcgatctgctgctgggcgattccgtggacgactcccgcgcgttcgcgcaggacgcgctcgcgcgcatcgaggcggagacgggcgtgtgggccagcctcgccatggacgagggcttcgaggccgccgtgcgcgcggcgctcgtggaggtcggcgccagcgaggaggccgccgacaaggccgtggcctatgcggctaagaacgccctgggcgataccgaccgcacgacgttccaggccatggaggcgctcgtgcacaacctgaacaccatgcacagccgcgccggcgcgcagacgccgttcagctcggtgaactacggcatggacacctcgcctgagggtcgcatggtggtgaagaacatgctgctggccaccgaggaaggcctcggctccggcgagacgcccatcttccccgtgcagatcttccgcgtgaaggagggcgtgaactacaaccccgaggatccgaactacgacctgttcaagctggccatgcattgctccgcgaagcgcctgttcccgaacttcagcttcattgacgcgccgttcaacgcgcagtactacaagggcacgcccgagacggagatcgcctacatgggctgccgtacgcgcgtcatgggcaacgtgtacgatcccgatcgcgagatcgctcccggccgcggcaacctcagcttcacgtccatcaacctgccgcgcctggccatccgctcgaagggcgacctcgatctgttcttcgacctcttggacgcgaagcttgcgctggcggtggggcagcttgacgagcgcttcgagatccaggcgcgcaagcacgtgtacaacgcgccgttcctcatgggccagggcgtgtggatcgattccgagaagctggcgcctaccgacgagcagcgcgaggtgctgaagcacggcacgttgtcgctgggctttatcggcttggccgagacgctggtggcgctgacgggcaagcaccacggcgagtcgaaggcttcgcagaacctgggcctcgagatcatcggccatatgcgcagctacctcgaccgcctgtcgcaggagcgcgggctgaactacggcctcatcgccacgccggccgaaggcctgtccggccgcttcgtgcgtatggaccgtgagcgctacgggtccatccccggcatcaccgatcgcgactactacacgaacggcttccacgtgccggtgtactacgacatcagcgccttcgacaagatcgagatcgaggcgccgtaccatgcgctgacgaatgcgggccatatctcctacgtggagctggacggcgaccccagcgagaacctcgaggcgttcgaggccgtcatccggcacatgaaggagagcggcatcggctacggttcagtgaaccatccggtggatcgcgatcccgtgtgcggttacaacggcatcatcggagacgtgtgccccaagtgcggccgcaccgaggcggagcacggccagtcgttcgagcgcatccgccgcatcaccggttacctcgtgggcaccctcgaccgcttcaacgatgccaagcgcgccgaagaaggcgaccgcgtgaagcatcagatgtaacaggttgaacgtgacccctcccgacactatacgtctttacggcacggctccggattccatcgtcgatgggccggggctgcgctatgccgtgttcgtgcagggctgctcgcacggctgtcctgggtgccacaaccccgacagccagccctgcgcgggcggcacggtgcgcgccatcgccgacgtggtggcggagatcgctgccaacaagctggtgcagggcgtcaccatttcgggcggcgagccgttcgagcaggccgccgcgtgcgccgcattggcgcgccaagtgcgcgagctgggactggacgtgtggacgtactcgggctaccgctacgagcagctggcggagggcatccccgatccggccgcgcgcgatctgctcgaccagaccgacgtgctggtggacggccccttcgtccaggcgcagcattcctaccagcttccgtggcgcggctcccgcaaccaacggttgattgacgttcccgccacccgagcccgcggtcgcatcgttttgtgggaaactcacgaagacttccctgtaaagcccccatcgtggtgaggcgccgtctcctttccttggcgacggtatggtcgacatggtaggataacggcatggaacagcttcaaaactacatcgacgctatcgtgcgcaccgactgggtgaccacggccatctcggcggtggtcattctggcgatcacggcagtcgtcgcgcgtctgacgaggcgcttcctgggccgcgtgcttgccatcaacgaagagcgcgatctgccctcaagctccatcttcatcaacatcgcccgcggagccgtgtggatcaccggcgtgtgcatcatgctgtccacctgcttccgcgtggacgtgagcgccgccatcaccgcgctcggcatcggcggcatcgccatctcgttgggcttccaggacacgctgtcgaacctcatcggaggtttgcaggtcagcctgctgcgcatcatcaaacccggcgacaacatcgaggtgggctcgtccacaggcgtggtgaaagacatcacctggcgccacaccaccatacgcaacggcgcgggcgaggaagtgctcatccctaactccatcatcagcaaaaccgctctcacgcaccttccgcccacgaaccaagtgagcttggccatcgtggtcaccacggaaggccagcatctcgacgaagtggccgaggctatcgagcgcaaggccggcgaggcggcggccggcatcggcaaggtggttaaacagccgaagctcacgttctcggagatcaccgcgcagggctatgcgggttccatctcgttcagcatggccgacagccgtaccacgggccgtgcaatcgatgcggtgctgcgcgccgtggcgccgctgacccgaacggcggcgcccgatcgcgcggagcaggtgctggaggaggcgcagcaggaagccgaagaggccgctgcgcaggaagccgccggccatgcgccgactaagccgaagcctaaaccgaagccgactcccaagcagaagcagaggccgagcttccgcaagcgcatggcgcgggcgctgcggcttgggaaagaggagcaatcgtgagcgaggaggcgatgaaaaccatgtccgaaacgcgtttgaccgaaggcccgctgcaccacctcgacggcaagctcgccgaatgcggatgggccacgtcgcttctgcgcgcgtacgatcgcgaccgtatcaaggcgccgaagcgccgcatcaaagaatgggactactacctggtgaacgacgacgagttcgctgtggcgctgaccgtcgccgatatgggttacgtggggctcatctcggcatcggtgatggacttcgcgcaggccacgtcgcatacggccagcgtgatctcgccgtttccgatggggcgcttcaagctgcccgccacctcggccgagggcgtgacctccttcgagaacaaccgcgtatcgttccgcttcgaggttgctggcgggcagcgccgcctcaacgtgtggttcgcgggcttcgacggcggcgacgacctgacgttcgaggccgtgctggacgaggagccgcgcgattcgatggtgatcagcacgccatgggccgaagacccgctcgcgttctactacaaccagaagatcgtcgccatgcaggcgaggggcagtttcaagaaggggcttttggtgcacgggttctgccccgagaactcgttcggcctgctggactgggggcgaggcgtatggacgcgcgacaacacgtggtactgggccgtggcgcagggttggcaggacggtcgtcgcttcggcctcaacctgggctacgggttcggcgacacgtcggcggcttccgagaacatggtgttcatcgacggtgctgcgcacaagttgcaccgcgtggacttcggcatcccccaaaagacgggcggcgcgcacgcgaagaagacggccgatcgctaccagctcatgcagccctggcatatgaccgacgacgagggacggctcgacctcgtgttcacgccgctgctcgaccgtgtggactggatggacttcaagctgatccgatccgaccagcaccaggtattcggccgcttcgacggtgcggtgacgcttgacgacggctcgaccctgccggtgtcgaacctgcttggctctgccgaggtcatccacaacgtgtactgatcaagcacgggacgggcgcgcgagagccgggaatgaatcggcgcgcggaaggccgggaaggttgcgttcgagcttgcttttgcgctgcccgttcgtataatagaggcgagccgcagggagctgctaactccccacggctctcgaatcgcttcggcggtttggcttcttgttacggctccttgtccttgcggatcgggagccgctccattatcgctgtcaagaaccccagcaaactggaagcgaactcaaggatcgccgctatcaaggccaaaacggtcatggcgtccatttcaggccatcgtagcggcttccggcaaagcgcaccatacgaccaggcgcgcgctcgcgcgcaacgaatcagtgtaaaacagcacatttagtgctgtttttccctccgtcggtccctct

SEQ ID NO: 49 - DNA, 39944 bp, Eggerthella lenta
  source 1..39944: mol_type = genomic DNA
gggggggggtgcgtctgtgagtgacaagctgtacgctcttaacaaggcgatggcttccgttgatttgttctaccaggtagagttgcccgacatcttcacgttcgaccatccgctgggatccgttatggggcgtgcaagctattcggattatttcacgttttcgcagggatgcacggtcgggaacaaccggggtatctaccctcggttcggccaatcggttttcatgctgtcggacagtaaggtaatcggcgattgcgagataggcagcaacgtgattatcggcgccaatgcgtacgtgaaagatgtggatatccccagcaattcactcgttttcggacaaagcccgaatctcgtgatcaaagagaatcgcgcggatgcggttcgatcgtatgtcgaggaggtgtttcgctatgagtagcatcgccgttatcacggctcgcggcggttcgaagcgcataccgcgcaagaacatcaaagagttttgcggtaagcccatcatcgcatattctatcgaggcggcgctcgagagcgggcttttcgacgaagtgatggtatcgaccgacgatgaggagatcgcggagatcgctaaggaatatggcgcgagcgtgccgttccttcgcagcgaaaataatagcgatgaccatgcaacgagtgccgatgtcttgtctgaagttcttttcgagtatcgttcgcgtgatagcgagttcgatattctcgcctgtatttacccgacggcaccttttatcacggcggaagagttgcgcaacgcggccaagctgcttacgaacacggacacgtcctccgttgttgcagtgacggatttcgactttcctcctcaacgggccttcttgttgagcgacgacggcaatctcacttgggagcgtccggagaatgcgcttacgcggagtcaggatctgccgagaaccgctcatgattgcggtcgcttttattttgcgcgtacggcatcgtgggaacggttccgttcctttatgatgcccaattgcagggggtactatatagatcccgcccttgttcaggatatagacactccgagcgactggcgaatggccgagatgaaatatctcatgtggaaagatggagagagcgaaaatgaaactatttgacattattagcaacggagacgtttacttcatcgccgagatgagcggcaatcatggtggaagtcttgaaaaggccatggagatagtggcggccgcttcggtcgctggggcagactgcttgaagcttcagacttacacagccgatacgataaccatcgactgcgacagttcggatttccaaaccttgaagggcctctggcaggggcgcactctctacgacctctacaaggaagcgtatacgccttgggagtggcagggagaaatcaagagcgagtgcgagcgattgggtatggacttccttagctcggtgttcgatcctacatctgtcgattttcttgagtccatcggctgcgaagcgtataaaatcgcgtcgcccgagctggtggacattccccttatcgagtacgcggcctcaaaaggcaagcccatggtcatctcctgcggcatgggcacggtcgaggagatccaagatgcggtcgacgcctgccatcgcatgaacaacgatcagatagtgcttctcaagtgcacgagcgagtatcccgccgtttatgcggatatgaatattgcgactatggcggatatgcgtgagcgctttggctgcacggtgggcctgtccgatcattcaatgggctggacggtggacgtcgccgccgcagctcttggcgcaagcgtgatcgaaaagcatttctgtatcactcgcgctgaagagacggtggattccgctttctccatggattgcgaagaattcaagagcatgatcgaagctgtacgctgtgcgcgcgacgcggtggggcatgtcacttatgagcgcaccccacgcgaggaagagaacatcgcgggtcgtcgatccctctatgccgtagcgcctattcatataggggatacttttacaaacgaaaacattcgcagcattcgccctgcccacggtctggcctcgaagcaccttccgaaactactcggcaagacggcgcggcgggatatcccctttggttcgccaattaggcaagaggatctggactcatagagtgaaggcgaagctcgcaagctgtcctacgattgccattcgcgccgacggttccaggtccgtcggcatggggcacgtgatgagaacgctttccattgcggaggcacttcgagtcgccggcgcccatgtgctttatgtttgcgccgacaaacagccaaaagagatcatcgaatcacgcggttttgaggttctggtgctcgaaacggatcccgctaatctcatgggcgagtttcaaaggctctcccttgtactgcgcgatatagatgcgcaattcgttttcgtggatagcttcgatgcaacggattcctacttcgagtccgttcgagccttgtgcccggtgggaagcttcgcatttggaaggaagttcacacgaggcctcgatctcgtcgtgtcgtatcttcctagctcagatgagcaatggctgaaggaccgtttcggccgtgatggaatagctcttctgttcggtgcgcgttacgttccggcgagaagagagtttcttgatatgaataaacgcagctttgccaattacgttaagagcgtgttgatcgtagcaggaggctctgaccagctaggaatgtgcgcgcgcatccttgaaaaacttcagggcgactctttctggagtgcgatcgaaaagcacgtcgtagtggggccgacatccggttgtcgcaacaaggttctttcattggccgaggatgacgccagcgttttcgttcacgaatcggtgagggatatggcgtcccttatgtcggaatgcgacatcgcgatcacggcatgcggtcattcggtctacgaacttgcgctatgcagggtacccatggtcgcatacgcaacatcggccgatcaggccgagaacggttttgtgcccggcatcatggaattcattggagacatcaggtccgatttggatgctggcacggataaaatatgcgcatctgcgcatagccttgtggtcgacgcatcgcggcgcgccgcccagatcagcgcagcttctactctgggggttgacggcaggggcgcagagcgcattgcgaagcagattctcgacattgcgcaaagggggcccaagtgaataaaggtggggtcagaccgcttgtcatatatggaactggcgatactgcaacgctcgtatactccattgcgatcgaggcgggcatcgaggtggccgcatttacgtccgacgcgctcgacgcccgcatggatacggagttaccgccttttgtggccaaatcagatttggcgaaggagtttcctccggaacagtacgacatggccatgggcttcatcggaaaggatctccagaaaacccgcgaggagaagtactgcgagatgttgaacaagggatatcgttttcccaatgtggtgcagcctggggcgcatgtgtccggaatgctgggaaagggcaacattgttatggccggggcggtggttgggcctagatgcagcatcgccgattgcaacatcctgtggcagaactgcgtgctttcgcatgataacgagatcggagacttcaacaacatatcgcccacggcgtctttctccggatatgccagggcgggaagccattgtcttattgggaacggggcgcagctcaacaacttcgttgtcgtcaatgattgggcgctcgtaggagccggggcatacgcacgtgaagatgttccgactgaggccgtgctcgtgccgcctcgaagttatgtcctggatggcaggaagggaatagagttcgcatgaaagacgattggaaagccgtggagtacgggagtgagtttcctttggaaaccgtggtaggagcgccctgcgttgatggcggcggctatgtgtacacgaggtcgggtcgcgatgctctgcgtctcgtggcctccttcctgaaaaatgcgggcaccgacgaggtcttgctgccttgttattgctgcgagtgcatggagtggcctttcctcgacgaagggctcgatgtgcattattaccgcgttttggaggagttcaggatcgatttagacgacgttgatgcgatggctgctaaaagagggcgtgtcgcccttctctatatgcattattttgggttgccgtctgccagcgacgtcgaattggaagaaatcaaaaagaagcactcgttgacgatcgttaaagacgctactcacgattggctcgattatgatttcgaggacaagtcggatttagacgactacacggtgctgagccttcgcaaatgggcggggctgccggagggtggtattgcgttttctgccaaacatcgactacccgtcgtcccggttgtgagcaaggatttcgagtctcgaagagaatcggccatggatctcaagcgcgagtatctttatgggatggatgcgcgactcaagccgcagtacctctctgagcttcgcgaatgcaacgagcttctcgactcgttccgggaaacgtccggtatgggggagagatcgagggctctttgcggaggggtgggctggcaggccgtgaagacggcacgacgcgagaatgcaaagctgcttgccaaaggacttcaagatatgggtgtaacctgcttttaccaagagggctcggctcccctttggatgcctttcgtcccctgctgcgatcgcgacgaacttcaggcaagcatgagcgagcggggtttgtattgcccgtatttgtggcccattcctaggagcgccgaaggttgttctggattcgtggatgaattcgtcggaagaatgctgtgtctgccttgcgatcagcgttacgatgcggcagacgttggcgatatgcttcgtattctgagcgagtgtttgaaaagggttgtcaaatgacaaaagctgtccttcttttaggcgggtcggctcagcagctcgattcttttgaggcggcgcggcgcttagggtaccgcactgtgctttgcgattgggatccaaattgcccgggacgggaactggccgattcgttctacgaagtgagtactatagaccgtgaagcggtgctgagggttgcgcgtgccgagagcgtagacggcgttgtttcctatgcctcggatgcttcggcacccgtcgcggcatgggtttcggagcggctcgggttacctggtaacccttgcgaatcggttgccatgctgtgcgacaaagggcgattccgtgcctttttggccgagaacggttttgctgtgccagataacgttgttgctaacagtggcgatagatcggctgctaagtctgctgctcaaatgattggtcttccgctcgtggtcaagcctgtcgactccgcgggaagccgtggcgtttctgtcgtgcgcgatttttccgagctcgttgccgcgtttaaccgtgcttgcgaattctcgcgcaagggtgaagtggttatggaaagctatattgagaccgccactgcaggtcgcgttatcgaggctgagctattcgttgagggtggaaaaataatctcctggggtcttatgagtgcctatcgggatttgtctttaaatggagtcgttccttcgtgctacattcatccgatggatgaatgtagcagagttaatgcctctgttcacgaggtcctctccgctcttgtcgctcgtgcgggcatcgttcagggtgctatgaacattgagctaattgccaataagtcaggcgacatttatatcattgatgttggtccccgtaacggaggtaactaccttccgcgttttttctcctacatctctggtgacgatattgttgaagctacgcttaggatagcggtcggtgacccatccgggcttaagcatttcgagcaatcaaaggatggcctctgggtgcaattcatgcattacgcccagacatcgggcatcttcaacggatttgaattcacaaaagagtatgagggagcgcatgttgagactcacctttacaaagagctgggctcgcatgttgaaccgctagaaagcatttctgactccattggcgtgagtcttttgcattttccgagcgaaagcgatcctggagctctttctgcgagacttcctgctatgtgtcgccccaaaattcattgatgacctcaagggagttgtgattcaagaaggtgcgggagaggtgcggtcttgccgcctaggcagtccaaacggccgtactccttgatgttggtggagaagtgacgcaaattaacacgaaggttggatctatgacccggattgtggttttgactggatcaaagtcacgctgaaggtgttcatcatcgtcacgcatgtgggcttgataaccgcctccatgtggcaagaccttctgtttcccttctgaatcgatcaagccgttccgcctctctgggtgatcagctcctttctgctcgcggcggctttcgagcggcacgggtcgactcgggcgcgagacgagctcgcgcgaagcgttcccgcgccccgcctgtcccgcgtggcgattacctatacggcgatcttcgcactgatgctcgcgatagttttgtgcagaggatcggatctttcgagcttggcatcgcatctaataggcgtcgaatgctgccaattggacgaggtcgcatcgactgcgatcctgtggcttgcaggaggggtcgggccggaaggctattacgtgtccatcctctttcagatgtacgccctcttcccgttcatgtatgcggcttcagaaagaagccgcttttgacggatcacggcgctgtactccggttctgtcttttacgtgcttcttgccgcgtacgccgagctggcagacggaagaagccggcaacccggcagggtttcgcgctgcgtggaatacctcagcaaggcagctccatgtctacctgttccagatgctgtacttcaatttcttgaacgcccacttgtagcaaaagctcgccgcgctacccttgtgggaagtagtcgccggcagcgttctcgtttgcgttgttgtgggagtcgcactgtactggtgcgaaagccttgttagaagaagaatcaaacgtttccgggcgcagactgccgcactccgagaattggatccagcgaaagccgtcattcctcgttagcagcaaacagcagaattgcaataagcatgcattgtgcatgaaaccgcagtttcatcgctggtttcatctgcccagcagaaacccctctgccgcctcgttgaactccgcccggttcttcctcgccacgaagtgatccccctccacgaaggcgagccttgcatccgggatgctgctcgctataaacctggtgtgctcttccttaatcatgtccctcgtgccggccaccaccagcgtcggcatgctcagggcggctagctcctcaggcgcgatgttcgggtcgttcaccatgaggccgagcatctcggcgttgcggcgcgcccgcccgctccgcctcccgaagaacgacgccacgcgatagcccgcctcgatgggcagctgcaccgacggcttcacgccgtgcgcgtcgaggttcgcgccgttgagcaccagcttgcccacgcgctcgggatgcgcgagcgcgaacacgagggcgatgttccctccgtcggagaatcccagcaagtgagcgcgctcgatgccgcgctcgtccatgaattccaacaggtcgtcggcgaactggcggatggtgaagggcgccttcccgcgcggcgacttcccgtgcccgcgcgtgtcgagagctattacgcgaaaacgcggcgcgaatgcgctcatctgatgctcgaagtacgagccgtcctcgccgttgccgtgcagcaggatgagcgtctcgcccgatccctgctcgcggtagtgcagctcgacgtccatcgccgctccctccctttgcgggcgtttcgccccgatgcgggatatcataccagcttggagcatcgacgggcgtacaatggccgggtagcgctgcaaggggagagtgggggggttgccgtgaaccagcgcaccgcactgctgtcggaggcgttcttctgcttggggctgggcgcgtcgagcgcctggtggctgtcgatgacgtcgagcccgttcgtctggtcgtcctcgtccctcgatgccgggagcgcctcgctcgtcgtccatgcagcgtacctgctcgtgcaaatcgcctgcgttatcgcggcgttgcggttcatgctgggttacgcgcaaagacgtacgttcgccctctcggcggggctgtgcgccgctggcacggcaggcctgctggccgccttgttcttcgggcttcccgtgccgtgcgtcatggctgcgcgagccgtcgcagcgtgcggcggggctttgctgttcttgtgttggatgtcgccgttcacggttctgataggccataagaggccgggatcggtcttccttgtcgccacggtgctgggcacggtcatgtggttcgtgaccacgcacatcgatgcgaccgtagcaaccgtctctctcgtggcgctgcccatgctctcgggtgccgccatgctcggccttcctcctgaaagtcgcgaacccgcccgtgtgcttcgaccgtgcgcgcgcaagcagcggctgccgctcggcaagctgttcccgctcgcgttcgtcgtcggcctgctcgtctacgagctgcccatggggttcgtcacgggctccgcgagcatcgcagcgtcggacgcgtcgggcggcgctctgttccaaacctacggcatctacacggtgatcatggccatcgtcgccggggccgactacgctctggcgcgccacgagcgttactcggcgctgctctaccggttcgtcgtgcccatcatctcgatcggcctcatcctgctcgcgcttgcacgggccgaagaccaggtgctcgcatcggccatggtgctcgccggcaccatcctgttcgagatgttcattatggtcgcgttcgcgcgcattacgctcgctgcgcgcgagagcccctggcgcatcttcggcttcgggggcgccgtggtgcaagcgtcgttgctcgcggcgttcttcggcggcctggttctggcgaaggcggcaagcacgtgggcaactgccatcgcgctcggcctcgtgttcgtgttcatcctggcgggttcgttcgacgtgccggggaagaacctgctcgcggcgggcgcggacggcataccgcgcgatgccggggacgaaccgctcgacggccgcatcgaggcgttcgcctatatgttcggcttgtcgacgcgggaaatcgaggtgctcggcctcatcgctcgcgggcgcagcgtccaggcggccgccgacgagctgttcgtggcgcacagcaccgtgaaaacccacatcggccatatctacgagaaggcgggcgtgagcaaccgccaggatctactgaagctgctcgacgggttcggtggatagccgacgggctcggaaccgagaatgctccccgacgggagggccatcggggagcggaaggaaggagcgcgcgtgcgctgccggggagggcgttagaagcaggtcttcaacgcgtgcttcaccgcgtagcggccggactctacgttcgttgccatgtggccgcccgacgtgttgaggttgtacaggcccaggtacaccatctgcccatcggcgccgatggcgtagaggttcttgatgggctgcttgccttcgcccaccacctgccactggcggttcgtgatgatgccgcccagcgacagcgcgatctcctgatggatcatgagggcgtacagcggcccttcgccgaacgaggcgaggtacttcgggttcttgccgaactcgtcgtcgttctgctgggcgacgtatccttcgtaggtggccagcgtctcggcgaagtcgcccgtccatccagcctgcttcgccaggtcggcggcgtcggcgcccttgaacacggccttggacgcgccgcccgctgccgcttctatctccttgcgcagatccttgttgccctgggcctcggcttcgtcgaccatcgcgtcgttcaagacgatgtacacgcgatcctgcgcgccgacggccgtgccggtgtagtcgtggcacggctccccgcaatcctcgttcgcgaagcgctcgccgttctcgttcacccagatggccgggtagtactgcggaagcgagtacgacgagatgccgtcgatgaggttgccgaacatgtagccgcgagctttcgcttcctcgcgtccaccgatggccgcggccatcttgagcgtgtcgcccaccgagccgggcgcacacgacgtcttcgtgatgtccatgtcgtagccgccgtattcggcgagcatgtcgaggttcgcagcccatccgccgccggcgaggacgaccgccttggcattcacctcgagcaccccgtccttcgtctcggcgaacacgccggacacgcttccgtcgtcgaccgtcttcagcgccctggcgcgcgtcttggtgcgggtctcgacgccgagcttctcagctgcggcgaatagcggcttcatcatgcactcgccgccgctgaagaagctgtcctcccacatgagcgccgtcggcgtcttgcccagcgttccggaatagtagtcggtggtcggggcgaagcgcacgccgttgtcgaccatccacgaggtgttgtcggcggaatgggcgatggtgtcggcccacagcagcgggttcaccatgtaatcgtacagctcgatctcgctgcggatgatctcggagggcgtgacggtgaggccgtacttcgcgcatccttcctccatctgcggcgagccgaaactgaagcagcagtcggtgaacatgccgttgccgccgggattgtcctgcgactccagcacgagcacgctcttgccgctttgcgcggcctcgaccgccgccaccatgcccgacgcgccggagccgacgatgcagaaatcgacgtccaccgtctcgtccgccttgcccgcgtactcctctgcgcggaacccggcccacgggtcttcgacgctcgcggccgcgggctcgccaccgccgtctggcgcggcggctgttttggagttgtcgttctgcggcgcgcatccggcgagcccgaacgccgcggccccaacggctgcggcacccactccgagaaagccgcggcgcgagagcccgcgagcctccgtggtcggcgcgttcgcggcatccgtgcggttggtcttcatcatgatgctcatcctcccttttcgtgcgtttcggccgaccttccctttggctgcgatgccagcgatcgaccgctggcatcatcatgcgtcggccgcgccgcacgcgcatccgatcattcgggcacgattgcgcgcatgcatcctccggaaaggtggatttggggctgctgtgctacactggcacccgaaaaaacgacaaacgagaaagcggggccatggcggggcatcaagaagcggagcgcggcggcgacaacctgcgcatcgacgaatccgaacgcaagagctgggcgagcatcgcgttcatccgcgcgggtggcatgttcagcgcaccgacgctcatggtaggcgcggcgctggggttggggcttgcgctcagcggcgcggcgctcgccacgctcgcaggcttcggcttcatcgtggcctacatgtgcttcgtgtccatgcaagcttccgacctggggctgcccacggcgtcgcttgcggcccccgcgctcgggcgcgccggcgcccgctacatcgtgtcgctcatcgtgggcatcgtgaccatcggctggttcggcgtgcagacggccgtgtgcggggcgtcgctcgcgctcatgttggccgacgtgttcggcctggccgtgcccgtgtgggcatgctcggtggcgctcggcgcgcttatgctggccacggcgctcatcgggttcgacggcctcaaatgggtgagctccgtcgccgcgccgctgctcgtcgccatctgcctgtacggcgtgggcgcgtcggtggcgcagacgggaagcctcgacgcgctcttgggctacgtgccgctgccggccgacgccatcggcctcatcgccggcgtgaacatggcggtgggcctgttcgcgttcgcgggcgccacggccggcgacttcgcccgctttgcgcgcacgcgcaaggacgccgtgctgtcgtgcgtggtcggcgtcatccccgcggcgctcgtggcgctgctcgccggcgcggcgctggccatcgtctccggccaaggcgacatcgccgtcatcatgaactccatcgggctgccggcggtcggcctcatcgcgctcgtgctgtcggcgtggacggtgaacgcgagcaacgtgtactccgcaggcctcggcttcgccgtcatgctgggccgcgacgagggaggatccaaatggaccacggccgtctccggcatcgcgggcatcgcgctggcggtgggcggcatcctcgggcagttcgaggcgttcctcaccgtgctgtccgcctgcggccccgcgttggccggcgtgatggtgtcggactactggctggtgcggaaaggccgtccggcgaacatcctcgtgatcgacggcgtgtccgcggcgggcgtggcggggctcgcgtgcggcatcgcgacagcgctcgtcacgggcggcacgttcgcgctcgtgccggggctcgaggcgctcgacgtgccgttcttcgtcgggccggtcaacggcatcgtcgtggcgatggcggcatacgtggcggcctaccgtttggcgggcgggatgcggttcgcggggcccatcgcgttcaagcggcccgcggaatcgactatcatgaaccaggtcgcacccgatgcgacggacggtatacaggaaggacgagcatgaggaagatcggcatccaggaaatcgaggacatcgcgctgggcgcggcgcttctcggcgcaggcgggggcggcgacccctacatcggcaagctcacggccatcggagccgtgaaggagtgcggggaagtggagctcatcggcgccgacgaggtgcccgagggcgcgttcatcatgccggcggcctccatgggagcccccaccatcctcgccgagaagggcgtgggcgccaacgagttcgccaagctgttcgacatggtttcgcgttactacggcaagcccgtgtacgccaccatgcccatggaggccggcggcgtgaactccatgctgcccatcgccgcggccgcgcgcctcggcatccccatggtggacgccgacggcatgggccgcgcgttccccgagctgcagatggtcacgttcaccatcggcggcgcgtcggccacgcccatggcgttcatcgacgagaaaggcaactcgggcatcctcgacaccatcacgaacaagtggaccgaggacatcgcccgcgcagctaccatgacctgcggcggcacgctgaccatcgcgctgttctgcatggatgccgacacgtgcaagaactacggcgtgcacggcatcgtgacgcgctcggaggagctgggtcgcgccatccgtacggcgaaagacgaggcggctgcggccggtctttcccctgaggagttcttcttgaagttcacgggcggccacaagctgttcaagggcaagatctccgacgtgctgcgcgagacgcgcggcgcgttcaacttcggcaaggtgatgctcgagggcatcgccgacgacaagggatcccaggcgttcgtcgagttccagaacgagaatctcagctgcacggtggacggcgagatcgtggctacggtgcccgacctcatctgcctcgtggaccccgacacgttcattcccgtgcccaccgatgcgctcaagtacggcaagcgcgtgttggtggtgggcctcgagtgcttcgatatgtggcgcacgtcggcgggcctcgacctcgtgggaccgcggtacttcggcatcgacaccgactacatccccgtggaagagcgctcggcgcggaagggagcgtaaatgtacaagttgggcatcgacgtgggcgggacgaacaccgacgccgtcctgatcgacgagaacctgcaggtggtggccgcggtaaagaaccccacctcgggcgacatctacatgggcatcatgggcgcggtggacgccgtgctcgacgagagcggcgtcgaccgcacactcatcgggcaggccatgctgggcaccacccagtgcacgaacgccatcgtggagcgcaagggcctcgcgcccatcgccatcctgcgcatcggcgcgccggccacggtgggcatcccgccgatggtggactgggcagacgacatcgcggcagtgtgcgtggacgcgctcatcatcgagggcggcttcgagtacgacggcaagcgcctggcggagttcgacgaggccgcgtgccgcgcgttcttcgagggcgtgcgcgggcgcgtggaggcggtggccgtgtccagcgtattctccaccgtgcgcaacgacgacgagctgcgcgccgcagagattgcgcgcgaggtgctgggcgaggacgtgcacgtgtccatctcgagcgaaatcggctcgatgggcctgatcgagcgcgagaacgccaccatcctgaacgcggcgctgtacgatgtggcgcgccgcttcaccgagggcttcgctcagagcctggccgacaagggcgtggtgaacgccgaggtgtacctgtcgcagaacgacggcaccctcatgaccatggagcacgcgcgccgctatcccatcctcaccatcgcgtgcgggccgacgaactccatccgcggtgccagctacctgtcgcgccgcgacgacgccatcgtcatcgacgtgggcggcaccaccaccgacctgggcgtgctggcgcacggcttcccgcgcgagagcggcgtggcggtgaccatcggcggcgtgcgcacgaacttccgcatgcccgacgttgtgtccatcggcctgggcggcggctccatcgtgcgcgtggccgacgacggcaccgtgtgcgtgggccccgactcggtgggctacgagatcgcgcgcaaggcgctcgtgttcggcggcgatacgatgacggccaccgacatcgccgtgcgtctgggcatggccgaagtgggggatgcggcgctcgtggccgacatcccgcaggaggtcgccgagcgcgccatggacgccattcgcgcgctcgtggaggacgccatcgacgtgatgaaggtgtcgagcgacgacatcgacgtggtgctggtgggcggcggcgccatcgtgctgccgcatgagctggccggaaccgccgaggtggacgcgcccgagcacgcgggctgcgcgaacgctatcggctcggccatctcgaaggtgagcggcacgtacgaagctctcgtggactacgacgtcaccccgcgcgacgaagcgctggccatcgcacgtgccgccgccgtggacgccgcggttgaggcgggtgcggtccgcgacaccgtggagatcatcgacgccgaggacgtgccgctcgcgtactacccgggccacacgaaccgcgtgaaggtaaaagccgcaggcgatctggggtagcccggcttccaggctcccggaagcgcgccgatcgagcgcggccgtcaacgcgacggccgcgctcttcttttctcgaccccgcgttcgccccaaacacacgcctcgcgtacatgaggcggttgtttggggcgaacgcgggcatctgatcgatgcactcgtctttcgttgaggcgatccgttggcgttcgcttgtgttatcatacgactagatgatactttggcaggaaggttggggcgcgtgttcgagacgttgcgggtgaacgatacgtcgggcgttcccgtgtggatccaaatccgcaaccacatgatcttcctcatcaggtcagggcacttgaggccgggggatacgctgcctacggtgcgcgagctggccattcagctgggggtaaactacaacaccatccataaggtgtatcaggatctggagaccgacgggctgatcttgtcgggacgtggaaaacgctcgaccatcgcggaaatcgatcgggaagcgctcagcctgcccgattcgcctgtagacgtggtgatcgaggaattggttcgcgtggtgcgggagacgggggtttcccgcgcggacgcgatgacgcgaatcgaggaagcgttcgcgaagctcgaggatcgataggggagagccatgggcgagaagaagccgtacttcgacgagttggacgacgtgagcgccgacgacgtcgtgattgcgaccgaagcgcagttcgacgagacgacgaccagccgcacgggcgcgacagcgcttcggtgggtgctgacgctgatcgtgttcttcctgttcgcaggcatggggtggcttacatggtcgcttgcgcctgtcgtcgtgggcgcgttggccagcgccgtgctgttcagctgcatgcacgtggtgctggagtgggagcgctcggtggttttgcgcttcggcaagttcaaccgcgtggccggccccggcctcatcttcatgatcccgctcgtggaatactcggcggccaccgtggacatgcgcatgcgctcgacggcgttcaaagctgagcacgtgctgaccgctgacctcgtacccgtgaacgtggacgccgtgctgttctggacggtgtgggatgccgggaaggcgtgctccgaggtgaagaactacgtccgcctggtgtactgggcggcgcagaccaccctgcgcgacgtgatgggcgcggtgaacatcgcccagctgagcacgcgccgcgagcagatcgaccgcgaagtggccgacattctcgagcgcaagacgaacgagtggggcatcaccgtggtgtcggtggaaatccgcgacatcgagatccccgacgacctgcaggaatcgctgtcggccgaggcgcgcgccgagcgcgagtacaacgcgcgcatcatcctggccgaggtggagaaggagatctcggagatgttcgtggatgccgcgcgcacgtacgggcgcgaggatgcggccctccagctgcgcgcgatgagcttcgtgtccgacagcgtgcgcgagaagggcggtctcgtggtcatccccagcgccctgtccgaggcgttcgaggggttggagaacatcgcgaagaaagcctagcgcgccgtctgcgcatccgtttgcctgaaggggctccgccgtcgcggagcccctttcgcgtgtgcgagctcgacgcatgccggttgaccacggttccatctgtgcccggcaacggtgccgggtatctatactcgaaaaagaatcataaacatgtaagacaagtatcacaaatttgtatgatttatgatacgatacgggcgacgggggagggtcgtatcgtgcagcgttcctgtcaagggagggggcgatattccgttcattaccgttttgaaggcagaaggcgagcaagcctttacggtgaaagcggcgcgcggggatttccgcgttgatccgcacgaaacgagcgaaagaaaggaaggggaatgagaaagaagctgatggtggcgaccgcgatgctgatggcgggatcgctgttcgccgccggttgcgcgcagcaaggagccgcggaaggggagagctcttcgaccgaggttcaatatcagaacagcatcgaggaggccgaagcgtatcttgacggggtgaacgagcgtcaggacgagctgaacaaggagtacgctcccgaaatccgcaccttggaagacggcacgaaggttcagcgcacgccgaccgagtaccagtgctaccactggaaccgtccgtacgaaggcggcacgtcgtacaacaactactatcttgatgccgacaaccgcggttgcggggcttgccatgaagatctcggcgacgccctggccaacatggagtacagccatccgaccgtctggaacgacgctctcggcagcaagatcacggtcgaccagtgcatgctctgccatagcgcagacgacggctacgagatgggcaccgtcatgcacggcgtccactacggcgaacgcaacggcgagaacttcgaggagcgtggcggcaaatgcatcagctgccacaacatgacggagaacgagcagggcgccgagctttgggacgtggtcaagtacgaccatcttgacggcatcgtcaaggttcccgacgtccagggcgagttcgtgttcgatcaggacaccgtcgtggcccccgaggacatgttcacctacgactggatccattcccgctacgacagcctgatccacatcatgggcaagaacgtgctggatacggagcttccgaaggacttcgtcgacaatttcgagatcaccatggacggcctggtgaacaagccgttcacggcgaagctggccgacctgatctccgaagccgaggcggccggggtcaccgtgacgaagctttcgaagatccactgcgtcgacaacatgcccggtggcggcggcatctcgaacgttgagatcacgggcatcccgctgacctggcttatcgagaaggcgggcggcgcgagcaaggacatcaccggcgtgctgttcgatcgtcaggagttccgcaccaacggcgcccagacgcacagcaaccgcggcgtccccgaggcttcgttcgaagacgtgtacctcgtttacgagatcggcggcaagccgctcgatcccagccagggcagcccctgcatcaactgggtcgagaagtgcgacgcccagtcgtacgtcaagcagtgcgtgggctacaagctgaccgacgaggaaaagccgtgggaagactggatgatgaacggtttcaattcgtacggcgagggcccctacatcaacaagccgaatgcgacggtgctcaaggtccccgagggcatgatcatcgagaccggcaagcccttcaccttcgagggatatgcggacgcctacgacgaggcggtggtcaagctggagttctccatggacaacggcaagacctggacgccgtacgacctgggccagaccgatcctagcaagtgggtgtactggcactacacgtggactcctgaaagcgacggcagctacgtgctgatggtgcggggcaccaccgataccggcctcgtgggaaccaacattcaaaaggtgatggtgaccgccaagagcaatgtggagggatagaatgagatacgctactggggcaaagatgctgggttgtaccgtggtgggcgcgacccttctgctgggaggcgcgggcgctctgggagggctcgacatggcgatggcccaaagcagcctgcttcccgtcgagacgatgcagcgcagcggtggactacgacaaggttgcgaacgtctcgggcgacttcaccttctgccaggacgtggttactccggccgacgaggtgttcaacctgttcggcacggcgaccacggccctgtgcgcaaagccgggctacgccttcgatgcggtcacccatgaaagctattacctcaacatcggcggcaacgtcgagaaggtgtacacggtgggtctcgacgagatcgagcgcatggactccaagatccagaagatgcgctgcacgtgcggcatgagccccgccctcgccatggccagcgtcaagggcgtcaaggtgtccgacatgctgtccatgaccgacatcgcccccgaggtgaacaccatcacgttcaaggacaaggacggctacggcctgcccatgcccctgtcgtacgtgctggagaaggaagcgctgctggtgtaccagatcgacgagcagaagctgtccgagggcgagcgcctgcaggtgtggatgcccgacaccgtggccaagtacttcacccgcgcggtcaccgacatcgagctatccgtttccgacgaggtgcccgaggtgcagggcccggacgacgagtaccgcgccaaagtgaacatcctcagcacggtcgacggcggcttcaaggtgggcgacatggtctccttcgagggctacgccgacgattgcggcgtcaaggttgcctccgttgagttctcgatggacggaggggagacgtggacttcgttcgacgcttcctcctcgaacgccgaggactgggtgtactggcacttcgactacgtggccgagacggcgggcaccttcaagctcgacgtccgcgcggtcacggaggacggcacggtctctcccctcgcctccagcgtggtgttcgacgttgaagcgtaggctcgtcgtcacttcgatcttgaaagcgagtgtttgaaatgggagaacatgtgagcgtgacgcgccgcacgctgttgcaggcatcggctgcgggaacctgcgcgctcgtcctcggcggcgttgccgcttccggcggcgaggcgcatgcccgcgaggccgaccaacggcaagacggcgacggcgcggcgtacggcttcctcgtcgcccttgcgcggtgttccggatgcggacgatgcgtcgaggcgtgcaggaaggaaaacaatctatccgacgatacccctgacaggagaacggtatcttcgttcaagcgccgaagagggaggagcttcttcatctcgacttcgtgcatgcattgcgaggatccgagctgcatgaaggtatgcccggccggcgccatctcgaaggacgcccatgggatcgtgaaggtgaatccggacgtgtgcataggatgcaagtactgtttccaggcgtgcccgtacgaagtgccgaagtacaactccgtttccatggacaaatgcgattgctgccaagggtcgggggttgcaataggggaggatccttattgcgtgcgcgtgtgcaaattcggcgccttgcaattcgggcctttggatgagctgatggagcttacgaaccattccgcggttcccgtcgcgcaagcgaacggtccctcttgcctggtgctgggaacggagaagtagtatggagctgcaaacgatatggagttggcaacccgccctgtacctgttcttgggcggcatgggcgccggcgcgttcgtgatggcggcggtgctgttcctgatcgaccggacgcgtcatcgcctgatcgtgtgcgtgtcgatgtgggctgcgctagccagccttgcggtgggtctgctgttgctgctttccgagctcgtcacgccgctgcgaggcctgatgatgtggcagagtttcggccacttcacctcgtggatgacctacggcgcctggggcgcgttcgcggcgatggcggtgttcgcggtgtcggcgttgttggcgacgcgcccggtgggcgtgtggctggcgaagaagtggaagtggttcgagaagcggggcgtcgcgctgcggcgggtgctcgcggtgatcggcatcgtactgggcgcgttcgtggcggtgtacacgggcatgctgcttatggcggccggcagcgttcctctgtggagcactccgttgctgccggcgctgttcacggtgtcggccttcgatacgggcgtggcgttggtggagctggtggcgctcgcgctgtcgaagaaggatgcccttgctcccaaggcgcgcgtgctcatggagcggatcgtcgtggtgcttgtgctggtcgagatagcggtgttggcggcgttctttgcggtcatgctgggaggcgacgtccagacggcggtgggcgcgacggctgcggcttctgcggcgctgctgctgacgggcgatctcgcagcctgcttttgggctctggtggcagcgtgcgggttggcgataccgttggccatggccgtgtcagggcttgtgctacacaagcgcggcaagaagaagcccggtatgaagcagcatggcggcgcgctgatggcggcgggcgccgtgggcgctctgataggcgggtgtgcgctccgcttcctgatcctcgctgccggcatgcatgccgacctggttgccgaaacggtgatgagcctgatcggatagatgcgaaagacggccctccctcgccgtctttcgcaagcgggccggcagcccttggctgccggcccgtgttttcgaggtcgcccgctgctgcaagggggcggcctgtttggttttgcgcggggtgtttgcttgtggtagggtggacgggcgcgcatcgttcgcgcggacgaggtggagtttgccggtgaaaggggatggcggtggcgcatcgggtgggggagcctctcgagttcgacgggtacgtggacgatttcgagcgcaatgtgtccgcgatgcagttctcgttggatggcggtgcaacctggacgacctatcagacggcaggcgcggtcatcgacaaaggcgtgaactggcatttcgtgtatcgtccggaacggcccggccgctatctgctgaaggtgcgcgcggtcgacggcgacggcacggtatcggatatcgtcgcggaatacgctttcgaggtagagtcgtgacggacgcgagggcgggcgcgcctgcgggcgcgggcgcgccgggcgtcgcgtcgttcggcggcatccgcttgcgcgccatcgacggggggccgcttgagggcgcgcgcctgttccggtcggcttcgctttcgcgcatcaccgagcacgaggcggcgttcgtcgtgggcggtttgggcgttcgctctatctacgacctgcgtaaccgttgggaggtggcgtccagtcccgaaccgcgtatcgtcggcgctaaaacgctcgcattcgaaccttccaccgatcgtgaacgttcggacgcgtctcgccgtctggtggccggcgtcatcggcgagtacggccgtccggaagagcgcatgatctgcaattaccggcgttatgcgcgcgagtttccccttatgggaaccgttctgcgcacgatggccgcggaacgcctgcctgccctcgtgcactgcgagcacggcaaagatcgcacgggcgtgctgtgcgccgtgctgcaacgcatagccggatgccccgaagacgacataatggctgcgtacctggccaccaacgaggcgaacgccgagacgacggctcacgagacggctcagttgtcgcaggggatgtcggatgacgagcgcgcggtgctggcgtcgtttttagaggcgcggccgacgtacttgcgtgcgttcttcgacgaagtcgaggggtgcgtcggcgggtttccggcatacgtgcgtgacgcgctgcgcctgacgcccgttcaagttgcgagcctccgcgcgctgttggctcgctgagcgcgggccgttgcggggcgccgcgctcgcaccggttccgcatgaagcaggcgcattccggaaagcgctctggcacggatcgcatggtatgcacgatttcgggacatcttttcgggaatggttcgagaaactcccagctcgcctttttctgtatgctcggcaaatcgttcatagcgcgcaatctctgccaacagcttcgtggggaaaggcggggcgatacggaaagcgccagggcgcaatggcgagccgggccgccattgcgccctcacctcggagccgcctcgatgtgatgtccgtcgtcgcgcttgcgcttcggggcagctgccggctcgcgctcgctccgcttgcgccgtccgtcgccggttcccgatcgcagggggttccgcttttcgacggctgtgctatactgtccccgcgctttagtacagtaaagtagaaaagcggtcgaagcgaaggcgtcatgagggaagggcgcgcggcgaccgggttcaggacgatgggagagacgatgaagaagaaactcgtagcgctcgcggccgccgtggccacgctggcgctgtccgcggtgatgctggccgggtgctccggcggcggcgacgcgcagcagcagggcggcgactccggcgcgacggacggggcgttcacgctgacggtgggcttcgaccagggctacccgccctacggctacgtgggcgatgatgggcagttcaccggcttcgacctggagctggccaaggccgtgtgcgagaagatgggctggaatctcgacctccaggcgatcgactgggacgcgaaggacgcgctcatcggcagcggcaccatcaactgcatctggaacggcttcaccatggaggggcgtgaagacaagttcacgttctccgagccgtacatgtacaacgagcaggtggtggtcgtgaagaaggacagcgatgccaagaagctcgaggatctggccggcaagacggtgctgacgcaggtcgactccgcggcgctccatgtcctggaggacgagaagggccagaagcccctcgccgacacgttcaaggagctccagaccatcggcgactacaacaacgcgttcatgcagcttgagtccggcatggtggacgccgttgcgtgcgacctgtccatcgccagctaccagatggcggccaagcccgacacgtacgtgaagctgggcgtgctggcccccgagaactacgcggtgggcttcaagaagggcgacaccgagctggcccagcaggtgaccgacgcgctcaaggcgctcaacgaggacggcaccgtcaagcagctgtgcgacaagtacgccgaccagggcatcacgtacgacaactgggtgctgtaaggttccgctggcctgacggccggcggacctgctcgacgctgcgggccgttcgcgcaccgaatcttcgcgcgatcccggaagctcgcgtaccgcagtacgcttcgcctccgcgatcccccgaatcttcggcacgggaacggtcctcgctgacgttactggacctgttatgtttgagaaaggccgaacatggaattcgcgaccatgatggagcttctgctctcgggcttggcgttcacgttgcagatattcgtcaccacgctcatcggctcactgccgttgggcgtgctggtggcgttcgggcgcatgagccggttcaagccggtcgcgctcgttacgcgcttctacatctcggtgatgcgcggcacgcccctcatgctgcagctcatggcgctcatgttcggcccgtactacctgttcggcctgcagatgggcaacgattggaagtactgggcgtgctccatcggcttcatcatcaactatgcggcctacttcggcgagatctaccgcggcggcatccagtctatcccgcgcgggcagtacgaggcggccgaggtgctgggctactcgcggttccagacgttcatgaagatcgtgctgccccaggtggtaaagcgtatcctgcccgccatgagcaacgagatcatcacgctggtgaaggacacctcgctcgcgttcgtgctgggcatcatggagatgttcagccaggcgaaggccatcgccgcctcgcaggtgagcatgcttccctacgtcatcgcgggcgtgatctactgggtgttcaactttatcgtggaaatcatcctcacccgcgtcgagaagcggctgaactactaccatgattgataggttccgctgttctggcgaacagcggaacggctcgacgctgcagaaagcctcgctgactttggcaagcctggaaggagcacatgtcatgaccaacgaacaacccgtcgtgctgctcgagcatgcgcagaaaagcttcggcgggacgccggtgctcaaggacatctcgctcaaggtgcagccgggcgaggtggtggccgtcatcgggccgtcgggcggcggcaagtcgacgctgctgcgctgcatgacgctgctggagacgctcgacgcggggcgcttggcctacggcgaccttgtggttgccgaaagcgacggcgcgggcgcggcggcctatgcgccaaaggccgtgctcaaggaagcgaagacccgcttcggcctggtgttccagaacttcaacctgttcccgcactactcggtgctgaagaacatcaccgacgcgcccctccacgtgcagaagcgcccgaaggacgaggtgctggcggcggcgcgcggcctgctggcgaagatgggcctcgcgggcaaagaagacatggtgccctgcgagctgtcgggcggccagcagcagcgcgtggccatcgcccgcgcgctcgcgctcgaccccgacgtgctgttcttcgacgagcccacgagcgcgctcgaccccgagctgacgaaggacgtgctgaaggtcatccgcgatctggcggccgagaacatgacgatggtcatcgtgacgcacgagatgaacttcgcgcgcgacgtggccgaccatatcgtgttcatggacggcggcgttatcgtggaggaaggcccggccgagcagctgatcaacaacccccagcaccagcgcacccaggcgttcctagcgaagttcgagggggagtaggggtagctccgctcaggatgacatcgcccagcctgcttccgaactgggatcgcggtatccggtcgtcggcttcttcgattcgggatgcggcgctatactggaagctgcaacctatccggaaagcgaggcgacgatggctatcgacaaggtgaaggcgtttctgcgcgagcggggcatggaggagcgcgtgctggagttcgagacgtcgagcgccaccgtcgagcttgccgcgcaggccgtgggctgcgagccggcgcgcatcgcgaagacgctgtcgttccacgtgggcgaccgcgtcgcgctcgtggtggccgcgggagatgcgcgcatcgacaaccccaagtacaaggcgcggttcggttgcaaggcgaagatgctcgccgccgacgaggccgagccgctgatcggccacggcgtgggcggcgtgtgcccgttcgcgctcaacgagggcgtggacgtgttcctcgacgaatcgctgcggcgcttcgacaccgtgtatccggcggcgggcaacgccgcgagcgccgtgcgcctgacgcccgacgagctggaacgctgcgccgcgccctgcacctgggtcgacgtgtgcaaggtcgtctgatggaagcgggggagcgccgttccggcgagatgacgttctacgtcgtgcgtcacggccagacgctgttcaacgtcatgggcaaggtgcagggctggtgcgacacgccgctcacggacgagggcgtgcgcgccgcgcagtcgctgggccgcgggctggctgaagtggacttctccgcggcgtactcgagcgacagcggccgtgccgtgcacacgctcgacgagctgctgcgcgcgcgggggagcggggtgccgttcggcccctacgatgacatgcgtttgcgcgaatggtgctacggcgacctcgagggcgagccgggagagctgctgcatgccacgctcgacgcggggttcggcgcgccgctgtcgttcgaggagcacaatcgacggctgcccgaggtggccgacgtgctggcggatgcggattgctccggccgcgccgagcgtttcgatgccatcgagcggcgcctgcgcgggttcttccgcgaggccggcgatgatgggctgaagcgcgacggcggcaacgtgctggtggtgacgcattcgttcgtcgtgcgcacgctcgtgtacctcatcgacccggagcgcgtgaacgatccggtgaagataccgaacgccagcgtcacgcgcatttcctacgacgggtcggatttccgtctgggcgagataggctccaccgcctggcaacggccgtgaaacggaagcggccggagcaagcccgccccgaccgcttctgaaaggaactaccagcgatcccagctgatgcggcagacaggcgcggtgccgcccatgccgccgtgttcgcgctggccgtgctgatggtggtcgtgcctccgagcctgatcgtcctcgcgtccgcgaggatggccgtcctcatgaccgtccccgtgatcgtgcgcatggccgcatccgcaggcctgcgtcccggcttgaccctgcttccggccgtgcggatgctcctcgtgcgatccctcttcggttccctcatggtcgagcggatgcttgcgcgcgcccatcagccactcgccggccagcagctgcatgcccatgggcatgagccgtaccgagatcgaacccactttgttgtaccagcccgtcacggcgcagcgctcgccgcgcatgagcgcgcggtacacgcggatggccgtctcgtcggtatccatggagaagtacttccacgcgggcgcgtcctcgatgccggcgttcttcgggaagttcgtgcgcgtggcgccggggcagacggtggtcaccgacacgccggtatgcttgagctcgcgcgccagcgcggttgagaacgacagcacgaacaccttcgccgcgccgtacagcgcgttgtaggggcacggcgttttcgccatcatcgagctcatgttgaggatgcggccgtggccgcgctccagcatgggatgcaggaacacgctggtcagctcggcgaggctggtgacgctgacctggatcatcgagcggatgtcggcgatgggcaggtcggagaactggccggcggggctgtagcccgcgtcgttgacgaggatctcgatttccttgcccgcctcctggacgcgcttgaagatggtgcgcgcggcatcggggtcggagaggtcgcaggctatgggaagcacgtcgatgtcgagcctgcgcagctcgtcggcttgcttttccagagcctccttgtcgcgtgcgacggtgaccagatcgaagtcgtcgctggcgaacagcaggcagagagcctctccgatgccgctcgtcgcgccggtgaccaatgcggtttgtgccatgatggcgctcctttcgtgccggacgcgctgcgcccgaatggtttttcccgtcatgataggagcgggtggcgagtgccgttcgggcggctgcgcggccgttggaaaggtgcgacttgcacgcaatcgggctgaaatggcgaggaggacgcttacgaatcgaatcgcgcatcctcgagggcaccctccttgcgcttcaggtcgggcgcggcgtcgtcgaggttgcgcatgccgcgcgcggccagggcgaaggccgtgatggctacccagcagcctacgagcacgacggcggccaccgaggtgcccagcgcgctgacgcctaccgaggtggcgaacacggcaacgggcgccgccgccagcagaagcgagttctgcgtgcccagcgcgctgccgcgcgacgcttcgggaatgcgatcgagcatgaagaagcccagcagcgccgacgcgggtccggcgctcacgcccagcacgagcgcgcccagcagcatgaacgggtagggaggcaacgcgcccagaatagccacgcccaacagcatgccgaacatcgacagcacgtaccatgtccgacgcgacagacgcggagcgaacgcggcataggcgagcgagcttgccagcaggcccagcgacatggtcgacagcacgtagcccagcagctcgggacggccgctgtccgtgaagaacacgggcaggacgaggccctggaacgatcccatgaccatgacgatgccgaacgtgagcagggtggagaccgtcagcacgccgtcggtgcggaacagcacgcggatgccggtgcgcagcgcgccaacggccgatggcacgacgccccgctgcgcggtcgcgtcgccttcgttcgcaggggcacccgatcgcaccgcgcccacgcagcgcgggatggtggcggtggcaagcgctgccgagaacgagagggcggccgtgaaccacagcgacggcacgccgccgaccaggccgatggacagcgctgccaacgcgggccctacgatggtgaccagcgaatcgagcgactgcgacaaccccatgaaccgttggaggtccacgtcgtcgtgtttggtgacggctggcagcagcgcgtcgcgcgcggtcatgccggggatgtcgcccacggctcccagcaggcccagtgcgacgaaccaccagaagttcagtccccatatcatatcgacaatgggaatgagcgcgatgctggcggccgatacgaggtcggaggcgatggatatggtgcggcggttgaagcggtcgagcgccgcaccgcccacgatgccgatggccatctgggggacggcgcagatgagcgccagcgtgccggcggccagcgcatcgccggtggtagccagcaagatgagcggaagcgcgacggctgcgatggagtttcccagcagggaaagcgcgttcgatacgaggaatctgacggatgtgcggccgaacatgaggggtcctttcttgcgggatccttcgactgcgcgcctgcggcgcttcgatcaggatggcaatcgttgctagaaaggagtaaaaactacgacgctgcgtcggggtcaagcgtcttgtgacgaagatatggaggggattcgctcaaggatgcgcgccttcagctcttccatgatgcgatcttcggcaacaatctctgtgggcgaaaggtctttgcggaggagctcttgtatagggctccatgcggttgaattctcgaagtcggcctcatcctcccagttgaccggctcgaagcagtccataacggggtcaagcagttcaagcgactccttgacaaggcgatctatgtcctccgtcgttgcatcggggcgcagttcgtcgtaacgcgcttggagagcccgtatcttatcgacgagtcccttctcgctgagtgctgcagtcactcgctcgagctcggcgacctccccttcgtcatagaggtgccccatgatgagcatcgcctggcgctccccgtcattaaagtgttctgcagcaaatagcgtcttggccgcgcgggcgaaccgcaccggcaagtcggggtccaactgctcgcgcttcagcagggcgatggtgcggcgttgctcctgcaagcgctcgatctgcagcgccagttcgcggtcgagctcatcgagcgcctcgtcggcgttcgggccggctgcttcggccagatgagcgtccatctcgtcgagcacctccgaaatgcgcgacagcgagaaccctagcgacgacagccgcttgatgcgcagcaggcgcacgaggttccctgcgccgtagtcgcggtagccgttctcgccgcgcggcggctcgggcagcaggtcgatggcgtgataatggcgcagcgtgcgcaccgacacccccgccagcttcgctatctcgctcgacttcaccaggaactctccttcgctcgcgcctaccgcgcccggcggaccatcaggcgctcttcgatggggaaggcgtcgatgctgcggcgctccaccgtctcgaaaccgaagtggccgtacagctgctcaagccgctcggtgtagcaatcgaggtagcaggccagcccgtgctcgtcggcgtattccagaaacggcgtgaacagacggcggaatgctccgctgccacgcttctcgggatccacgccggccgagatgaagtagatgaaatcctcgtcggccgccgcacgctcgagcggccagctcgtggaggagatggggtccatcgcctcgatgcgcggtcccagcacgtcgatctcttcgtcggtgagcacctcggccagaagcgcgcccgattcctcctcgagctcggtccagtcgacgtcgcccagctcgctgcgcaggtagacgttcgcggcccccgctcggtcgggcagcgcgtacacgcactggtacggtgcggtgacctcgtagtccgatcggatgacggcgcgcgtgatctccagcttgcgatcgcgtccgatgcccagctcgtcgagcgcttcgagccaggtgacgtaccacatctcctcgaggaagcacgtgcccaccatgcgggcgagcgcgtcgagctcctcggttcggtcgggttggacggtgatgagtccgggcaggttcatagggcatccttttgcgattcggtttcggttcgtcttcgattctcgcacgacccgctagccttgtcgagcgcttcggtgattcgggttacaactgagggcaaggcgcggccgtactgcaatccggtcgcgccggtttgtcttcgccgcatcgcgctggcgctgccgcgacgacgggctgcccgttcagttcgctttcgaaggaggcttttcgatgaccgtcaaggattttctcgataccaacgatttcacgaaggaccagctgctcgacatgatcgagctgtcgcgcgtgctcaagcgctgcgtgaaggccgggtactaccccgagctgctgaaacataagacgctgggcatgatcttccagcaggtgtccacccgcacgcgcctgtcgttcgagggcgccatggccgacctcggcggcacgggccagttctacgcgcccggcaccatccagctgggcggtcacgagaccatcgaggactcggcccgcgtcatgagccgcctgctggacgttctcgaagcgcgcgtcgaccgccacgaggacctcgtcgagctggcgaagtacgcgacgatccccgtgatcaacggcatgtccgactacaaccatcccacccaggagatgggcgacctcctcaccatgatcgagcatctgcccgagggcaagcgcatcgagaactgcaagatggtgttcgtgggcgatgccacccaggtgtgcgtgtcggagatgttcatcacctcgaagatgggcatgaccttcgtgcagtacggccccgagggccatcagattcgcgaggacatgctggagatcggtcgtaagaactgcgaggtgtcgggcggcagcgtcagcgtcaccgacaaccgcgaggaggccatgaaggacgccgacttcgtgtacaccgacgtgtggtacggcctgtacgacaaggagctgtcgaaggacgagcgcatggccatcttctacccgacgtaccaggtcaccgaggagcttatggccatggctgccccggacgccaagttcatgcactgcctgcccgcctcgcgcggcgaggaagtgaccgacgcggtgatcgacggctcgcagtccatctgctgggacgaggccgagaaccgcaagcactccatccgcggcttgctggcgtacttctgcaagcaggccgaaaccgaccagaccgaagccggagaagcccacgaccagctgaactacctgctggaaggcctcggcaagcaagcgatcaagtaagggtccgactgatttgaaagaggctccttatggcaaagaataagaaattccggttggtcgacgcgatcctgtcggtcatcaccgtcgtgttcgtggccgaggcggcggctcctgcggccgccatcggcaactcgcagttcttctggtggatcttcctcatcatcgcgtttctgctgccgtacggcttggtggtcagcgagctgggcaccacctacgacgacgagggcggcctgtacgactgggttcgccgcgcgttcggcgacaagtggggcagccgcgtgagctggtactactggatcaacttcccgctgtggatggcgtcgctcgctttcctgttccccgagaccatctcgatgatcaccggcatggaaatagggctggtgccctcgctggccatcgagctggcgttcatctggatcgtcgtgttcctcagcttctcgaaggtgtcggactcggcgtggatcctcaacctggccgccgtgctcaaggtgggcatcgcgctggtggtgggcggcctcggcatctggtacgccgtgaacttcggcttcgcgaacgacatggcgcccgagacgttcctgccggcgctcgactcgaacagcctgacgtacttgtccatcatcctgttcaacttcatgggcttcgaggtcatcaccacgtacgtgggctcgatggagaacccgaacaagcagattccccgcgccatcatcgcgggcggcatcgccatcgcggcgctgtacctgttcagctcgttcggcatcggcgccgccatcccggccatggacatctcgctggactccggcatcatggacgccgtgggcatcatggcgggcgtgggcagcgtgctgttcatcgtggtgggcatcgtgttcctcatcacgttgttcggcaacatggtcagctggtcgtttggcgtgaacttcgtggccgagcacgcggcgcgcaagaagaacatgccgaaggtgttcgcgcacgagagcgagaagaaccagatgcccaccggcgccgccatcgtcaacggcgtggtggccagcgtgctggtgctgctgtcgcccgttatggagctggcgggcttcgacggcttcttctggatcttcttctccatgaacatcgtgttcctgctgatcagctacatccccatgttcccggcgtttttgaagctgcgcactatagatcccgcggcgaaccgcgtgttcaaggtgccgggcggccgcggcgtggcgttggtggtggcgtgggtgccggtgatcctgctggtgctggccatcatcgccactatcgttccgctgaacggctcgcccgaggagatgagcaagatccccatgctcatcggcgtgatcgcgttcgtcatcctgggcgagctcgtgcgcatctggtcggcgcgcgggcgcaaggacgactacggcggcatgggctcgagcggcgacccgttcgagttcgatgtggcgcacggctacgaggaaatgcctgaatccgagaagatcgccgtggaagaggacctgctcatcggccgcgagccgcgcgatctggtgtaacgtgacccgtgtcatcctgggcggagcgccgaaggcgcgcagtcgaaggatcccgtgcggcgatagcgggagccgccgcggctggcgccaaacgggatccaacgaacacgctgcgctcgctcaggatgacaaccaaccccgaaaggacgtacctatggataccatttacgagaacgaatcgaccccgaagaaggacggctaccgcatgcccggcgagttcgagcctcaggagtgcatctggatgctgtggccgcatcgtcccgacaactggcgcgacggcgcgaagcccgcgcagaaggcgttcgccgacgtggcgcgcggcatcgcccagttcgagccggtcatcgtgggcgtgaaccccgaggactacgccgccgcgcactacgtgctggcgggcgaggagaacatcctggtcgtggagatgaccagcgacgactcgtggatccgcgactgcggccccacgttcgtggtgaacgacgacggcgacgtacgcgcggtgcactggcacttcaacgcgtggggcgggctggtggacggcctgtacttcccgtgggaccaggacgcgctcgtgggcctgaaggtggccgacctcgccggcgttgaccgctaccgcccggactcgttcgtgttggagggcggctccatccatgtggacggcgaaggcaccgtgatgaccacggagatgtgcctcttgtccgagggacgcaaccccgagctctcgaaggagcagatcgagaactacctgtgcgagtacctgggcgtcgacaaggtgatctggatcaaggacggcatcgaccccgaggagacgaacgggcacatcgacgacgtggcctgtttcgtgcgcccgggcgaggtggcctgcatctggaccgacgatgaggacaacccgttctacgaggccgcgcacgccgcctacgagacgctgtcgaatgccaccgatgccaagggccgccagctcaaggtgcacaagctgaccatgccgaaggagcctacctacatgacgcaggaggaagtggacgccatcgacgtggtggagggcactatcccgcgcaccaccgacgacgtgtgcatcgcctcgtacatgaacttcctcatcggcaacgatttcgtgctggtgccccagtacgacgacgaatacgacgagaaggcgttgcagcaggtgcagcagatgttccccgaacgcgaagtcgtgggcgtgcccacgcgcgaagtggtgtacggcggcggcaacatccactgcatcacccagcagcagccagctggcgtgtaaagtccgaagccccaatcagaaaggatttcccatgtcctatcagaaaggacccggccagaccgtggtcatcgccctcggcggcaacgccttgggcaacacgccgcaagagcagctcgagctggtgaagaacaccgcctcgcacatcgtcgacatggtgggcgagggcgtgaacgtcgtcgtgtcccatggcaacgggccgcaggtcggcatgatccaaaacgcgttcgactacgcgaacgctcatgacggcaagacgccggccatgccgctgcccgagtgcggcgccatgagccagggatacatcggctaccagctgtcccaggccatcctgaacgagctcaagcgtcgcgacatcatgcgctcgtcggtggcgctcatcacccagacggtggtcgacgcgaacgaccccgcgttccaggatcccacgaagcccgtgggcgcgtttctgactgaagacgaggccgtgcgtcttgcgaacgagacgggcgccacgttcaaggaggacgccggccgcggctggcgccaggtggtggcttctcccgcgccggtgcgcatcgtggagttcgatgccatcaaggacctcgtggacgacggctacctcgtggtgtccacgggaggcggcggcgtgcccgtcgtcgaggaggacggcgggtatcgcggcgtgccggccgtcatcgacaaagaccgctccagcgccaagctggcggccgacttcaaggccgacatgctggtcatcctcaccgcggtgccgaaggtggccatcaacttcaacacgccggaccagcaggacctcgacgtgctgaccgtggccgaggccgcgcagtatatcgaggaaggccagttcgctcccggctccatgctgccgaaggtggaggcctgcatcgcgtacctgcaagcctatcccgagggcaaagccgtcatcaccagcctcgagaacgccgccgaagccatcgagggcgactccggcaccctcatcgtggcgtaagcgccgaaagcgtgcggcccgtcgacgcgcgggccacgcgcttctccatcgtgaacgcgcgagtcgaaattctggcacaaaataacgggtaggggaacgattcggcgctgtttcgcatgtacgataggggtgaaaaacaagaaacctcgggtcgaaatcgtccgcaatccgaaccaaactcccctacccgtaaatttgtgccaaaaacaggcaccccacgttcaaaccgcaacccaacaaaccgatgctaatcgtgacaagcgggagcggctcaacatgggcgtaagctctcgtcaggaggtgctcgacattgtgtacgatgcgggcgccgaaggcgagacgacgcccgcatcgtgagaggttcttactccgcttcgagcagcggttcggattcgggggcgggttttgtttgcgctgcccccgcccgcctcagcttcccgcattcccgcgcggccagcgccacggccagggcggcggccatgagatcggcggggggctgcgaccaccagacgccggtcaggccctcgacggccgccagcaccacgatcatggggatggcgaacagcaggtagcggcacactcccagcagaatggagatgcgctcctgtcccacggcctggaagtacgctgaggccacctgcgccaggaacccgaacggcgcgcacgccagcagcggcaggaagtgcgaggcggtcagctcgatcagctggggatcgtcgccgatgaagaaagccgaaatgggctcagcgaacgcgatgaccagcccgcacacgacggccaagatggcaaacgtcccggccaggctggccttcaccagctcgcgcaggcggtcgaagtggcgcgcgccacggttgaagctggcgatgggctgcaggccgtaggtggcgctgaggcacagcatgtccagcaggtagacgacgtagccgttgatcacggagaacgccgcgagatcgggatcgccgcccagcgagcccaggtagttgttgatcgcgatggtgtacacgaggctggctgcctgcaccaggaacagcggcaagccctgccagaggatcgcgcggcatatcgcaggatccagcttcatgcctccgaacgtcagcttgaaggtggactgcttgttgagctggaagtacagaattgcgaggaaccacagccccgtgctcatgccgtagtacgcgcccgcggcggcgaagcccaggtcgagcacgtacacgcacagatacagccatagcagcgacgtggcggaggcgatgacggcaagcgccgaggccagcgaaggcttctcgtcggtgcgcaacagcgagcacagcagctgtcccagcgtgcagaacgggtagaagcacatgagcaggcggatgaacgccgtcacgtcgtcgtggatgtcgggcgtggcgcccagcatcgtggctatctgcggcgcgaacagggcgatggccgcggaaagcgccaccagcaggtaggcggccagccagaacccctggttgaacaccttctgcgcgcccgccgtgtcgccgctgcccaggcgctggccggctgcggcggcggtacccatgcccagcgctccgcccagcgccaagttcagcagctccagcggaaggatgacggtgacggcggccaggccgagcggccccaggccgttgccgatgatgaggccctccagcaccaccatcaccatctgcgccagcatgccggcgaacgtgatggcggcgtagcgggcgaacagcggcttgatgggagcggtgcccagctcgcgttcggtgggttcgggttcgatgagcagctcgtccattaccgtcggcctccttgagcctggtggcggttttcgtcgtgacgaccttatcgcgaagccgacgcgagcgggggattataccggtcgcgtttcgagagggcgcgggattatatgggattagcgcgccatgctggacgcagcggaacaaaaatccgcgacgtgcggaccctggttttcgtcgccgtccttcacggatttaaacggttcgaaaagtgcctggtcaggatcatgggtttgttgcggcgcgcggctaagggctccgatgggcgtcctgaaggtgtttgccaagggtctcgaaatccgcacgtcgggggttttgtccgcaacgggccgattctgctgcggttcgccgcgcagtgggttcatgcgcaacgaaccgatagcggcgcgttgactgggagcggatgcctcaggatggcgaaaaaaagatggatgagtcattgaccctgtccctttgtctcactctttccagaagtcgcgcgtgaggtcctggcggcttgcgtggtcggtcttcttcaggatgttgtgcacgtgcgccttcacggttcccagcgccagctgcagctcgctcgcgatgttctgattgtccttgccctgcagcacgagggcgaggatctcccgctcgcgtgcggtcatgccgtggcgttcgcagtacgcgggcagcaggtcgtcgatctgccgtcgcacctcggggttctcggatgcgggcggctccttgaaccgcagccgcaacgtggctccggcttcgcgcaggctgaagaacgcgaacgccagcatgaggaagttctcggagaagttgcgctcggatatgtagaggggcagcatagagaccgacgtgggatcccacactagcatcatgaacgtgtcttccaggatgatgcacatggtcagcaccaacgtgatcaggaacaaaggctcgtgacggcgcagtctcgtcttctcgatctcgcttttggtggtgcggtagcgcatgagcacgtagccgaggcaccacagcaggaacacctggcgcatgctgtagaacagccattgcttgtactgcccttcgggcagggcgacgatcacgacggtgctgagcacgacgaagcccacggctggagcgatgcgcatcgacatccgtttctcgccgaggaaatccaaggcgatcagccacagggcttccaagatgccgagggcgaagaatatcctcagggccggctggtcgatggcgtagaacacttcgagggggaactcggtgttctgtccgaggtattcgttctggaaaatgagcgccagatcgaggaagtagaacaggaagaacgccaccatgtacagatggcttcgtttacggcagacgaagtacgcggaaagggagatcgttcccgccgcgatacagacgagcatgacgaggatcgtgtagaagtagaaggcgatctccaaggtttagtccccctcgctttcccgtttgcgggtcggccgttcttcatgcggccattctacctcgtgggtttagcgagtcgtatcggggttgtagagcttttgtaaactgagactatagtgcctgttcagaggatgggttacgggggattatttcggttatagatttcttttcgtgaaaataatcttcattattccttcacaacgcggggtgccggtcgcatagtgggcgccaagagatgcggctgccgacggcatgtcgcggaccaccgattccat

SEQ ID NO: 50 - DNA, 30372 bp, Eggerthella lenta
  source 1..30372: mol_type = genomic DNA
acgatgccgcgtagcgcgagctgcaggcataaaaaaatgggacgcgaacgtcccaaagaaagacaaagggttctgccccctccaaaaaacagaacccttatctttaccgaagcatcaaagcctctgtaaatgcacggattattataccacccctcttcacgaaatcacaacatatattttcggcgagcaacgagtggggaactgagctggggcgacgatgccgacgagctcgtattcggcttggtgtgaccgagatcaacccttcgtcaggcgcaggatgtcctcgcgcgaggagacgtcgagcttgcgatagatgttgtggatgtgggtgcgcaccgtgttcggcgagatgaacagcacgtcggagatgtaggcgccgctgtggccttcggcgaggtaggcgaggatttcctgctcgcgcgccgtgaggttgtgcgcgtccgccagctgggcgcagcggtcgggcgagcttgcgggcgtcgcctcgtcctcggcgtgctcggcggcgcgctgttcgtcgtgcgcatcgcgggtgcggcgcatgtacgacgagagcaccatgacgaacgcgtacagcgtggtggtgaccgtcaccgccacatggacgaggtcgtcgtcgagcacgctcgcgaagctctggccggcgaacgaggctgcgcagaacagcagcacggcggtggagaacacgaggtcggccgagaactcgcccgcgttcgcgatggcgcatagcgtggccagcgtgaggatggccgccagcgcgtacagcgcgtaggtcagaaacgacacgagtcccgacccgctgcccaccgatgccgagatgctggtggccgccagcagcaccatggccatgagcggcaggaacgtctggtgcatgccgcctcgcagcgcgaagcgctttttgcgaagggtcgtgtacgccagcagcgtcgcggcatcgagcgcgagcgcggccaggtaggcgttctggctctcgttgaacgcggtgcgcatgacggccatcgcgaacgcgaacacgagcggccccagcccgggcgcgacgaccacgtcggccagcgaggccagggtggcgcccgtcgtgcggccctcggcgcgttcgggggcggtctgctcggtgctgtccgccgttcccgagaacgcgagagggacgatgacggccgcgatggagctgagcacgaacagcaccgtcacgcccggcaggggcagcacggcgtacagaaagcagatcccggccgacagcatgctggcaagggaaacggcgacgagcgcgcgcttgattttgaaacgcgcgcagatgcgcccccacgtgagcgccaagcacacgtcgccgagggtggcggccacggcaagcgcgatgagcagcgccgtacccaagctgccgaaccaggagaagtacgcgaacgcgagcgcgcagcacaggcacagcatgccgcccccggcgcccagcagcatggacggcaggcgctttcccgccagcgacaagccgaggaacagcgcgccgaacagcgtggccgccaacagggtggtttcggcgaaggtgcccacgaacagcaacgtatgctcgaagcgcagaaacgagatgaccgttcccgaatagatgagcagcgtggagaacaggcaggcgacgccaacgatgagcgctgtcatcgcaggcaaggagagcccttcgcccgctcgcccgcgttcgagcttgcccgttgtttcgcgttgcgtctcgatagccgcctccttccctcgccgtgcgtcgcattatagcattcgcgcgtctcacctgcgtaaacaatcgacgttgaggcgtctacgtaaaatcgttgagaagcattcgccatctgcggaaacgcaaatcaacgttttttcggatggaagcgtgcgtcggttcgggcaaagatggggtcgcagggtacgaagcacaacgcaaaggagatggggaacatggaactttctcgcaggaacttcttggtgggcgccgccagcgccggcgtcctcggcgcgatggccgggctgaccggatgcgcgccgcaggcgtcgtccgcgtcggctaagaacggcgacgcgtcgtccgccgacgcggcggtcgcgcgtccgacctattacatgtgcgacgaggattggctgggaagcgcgcccgagatcgccgacgccgacatcaaagagacgaagagcttcgacgtcgtggtggtgggcggcggccatgccggcacgcaggcggcgcttgcggcggcgcaggagggcgcgaaggtcgccgtcatcgagaagcacaacgacggcgagatcgtttaccgcggcgacgacatctgctcgtacaactccaagatgctggaggcgtggggcttcggcccgtacgacctcgacgagatcgtcaacgagtacgtgcgccgcgccaacggccgctgcaacaccgaagtcatccgctcgttcgtgtacaactccggcgagatgatggacaacctggcctcgctgatccccgacacgtcggacgtgttcgactacgagggcggccagtgcatcgtgcagatcgcctacgacaagcccagcggtgccgattaccccgtggaggtttcgggctacaagatgtgggcgtccacggtgcagacggtgggcacgaagaacgagcagcccgtgggcaagaagcagaagacgggcatctcgcgcctgtccgaaatcgaggaatactgccgcgacgcggccgaggatctgggcgccgaatggttctgcgggcagaccgcggcgcgctgcgtgcaggatgccgacggcgctgttaagggcatcatcgccgaggacgccgacggtaactacgtgaagttcgaggcggccaagggcgtcatcctggccacgggcgacttcggtggcaacaccgacatggtgtgggagctgtgctccgaatgcgccgagaacgccgagcgccacggcgtggaccgcgccgagctcatgggcatgaccgactgcgacggatccggtcataagatcgggtgctgggcgggcggcgccatcgagagccatccccgcccggttgcgggcgacgcgccctccatctcgttcggcccttggggctccacgccgtgtctgtggatgaactgcaacggccagcgcttcatgaacgaatcgttcgcgggcctcgtgctggcgcagtcgtgccgccagcctatcaacccggaggccaagatggtgggcaacttcgccatcatggacagcaagtacatgagctacatccaggcgggcggcctcgatcacggcgctcccaactggggcttccccgagggcattgaggagttccaggcgcagatggcggcggcggatcccgctgccggcacggtggaagtgcgcggtttggagatcgcgaaccgcacgagcccgttcgtgaacgagatattcgtgggagccacgctcgaagacgcgctgaagaacgccggtctcgaaggcgaggcgctcgagaacgccaaggccagcgtcgagcgctacaacgagctgtgcgccgcaggcaaggacaccgacttcggcaagccggagaacctgctgatccccatcgacgaaggtccgttcttcgttgccacgcagggcacgaacaagctgtacggccccggcctgaacaccctggcgggcttgtgcgtgaacggcgattaccaggtgctgaccgcttcgaagaacgaggtgatcaagggtctgtatgccgtgggcaacacgatgggcgagcgctacggcaacgcctacaactgcccctcggccggcaacaacatgggcaacgctatgaccagcggccgcgtggccggcaagcacgccgcaaccgcgtagctcttcaacctgccataccctccctccctcggaagccgcgccttttggcgcggcttccggcgtgtttgcgtgcgggggttcagtggcagtcgccgtcgagctcgatcatgtcgaggagcgcctgctgggagtgcacgccgaacttgcggtagatacgcttgatgtgggttttcgccgtttcctccgagatgaccagctgggtgctgatgaagctgcagttgcgtcctttcgccagcagttcgagcacctcggtctcgcgcggcgacagtcctctcatctcggccagcttcttgagcgagcgcctgaaccgcggggctggtccatcctggccaggcggatcgaacatgctccatcccgattcggggaaagggctttcgaaggcgaacagcgacacgagcaggatcacgaacaccgagcatgcggccacgacggccatcgtgtaggggtcgtcggcaagcagcacgagctgggcgcctgcaatagagccggccagctggccggccatgagcatcatcatcgacaacgatgcgaaacgggccaccggcttgtccagcttgcgcgccagcagcgcccatagcgcccagatgatgatgtagaagtactggtagcccatctgatgcagcgcgaacccgatgaggtcgagcggataagtgagcgagaagaagatgaagcccgccgccatgagcggcaaggcgacctggtaagtcatgtgccggaaatccattcggaacacgctggtggtgacgaggatggcggtagcccccaggatgagcgccacgatgttgaggtagtctcgcacggtgataaggttgtcgctgctcagcgcgaagaagcctttcatgagtccgtatgaaaggccgaagaacagcgatatgcccgcgatctccagcagcgccttgcgcgtcgtggtgaggcggggcttgcggccggatgggggcgcgtcgggaccggcgacttcgtcggagggctggcgcgcggtccgcacgatgctctgcttgcgcgtgaacagccacatttccgcagcgggaagtcctaccgtcagaaagcgcgcaacctgatcgggcagaaacgacagcagcaggtagaacgcgctgccgatgacggttgccagcatgctgtacacgatggtctggcgtgcgccgagtatggtgagaagctcgccccagaggatcacctcgacggcgcttccgactccggtgatcagcgctccgaacaagtaggcgaacgagctcgcttcgttgaacgaagcggccgacggatacgaaacgagcagcgtccccataagcgtaagggctccggctacgagggggacggccgagctgcgtccgaataccggccgcttgcggctcatgacgaacagggcgccgtagcctagcacgttcgttaaaagcgaaagcagccagagcggttcgaggggcacgcctaccgtggccggccctggcgcgggcgagatggagtagaaggtcgagctccaaaacgttacccaaacccacgtccagtgcagcgcgaaacctaacgcgatggtcggctggacgtcgaagctgaacacggagagcttgatgcgcttgcccagcgcagcaaagccgaactttcccatgcttcccccttcccccgttctctattgtatcgggtttgccggggaaaggctgcaagcgcagggggcgatccccgcaaaacgtatccccctgacaggggtattttcgggttgcccccgttccgtcgcggtgaaacgggtgtaagggctgctagatttcgaccagagccaacggggaggccggccgcgcgaaacggcggccgccaggggacgggggaagttatggaacgtatgcatgcagatgagagctcagcgcatggaggcgctgaagtttatttggacaacgcggcgaccgcgcctatgcatccgcgcgtgatcgaggcggtttccgccgtcatgcgcgatgcgtacggaaatccgtcgtcccagcatgcgaaagggcgtgcagcaagggcgttgctcgacgagagccgcgcggtcgtggctgaggcggtgggcgcgtttcccgacgagatctatttcacctcgggcggcacggaggcgaacaacctcgccatcacgggatcgtgctctgcgtacgctcgcgatcatggccgtgcgggggcggtggtcacgtccgcgctcgaacacccttcggtcacgaaaacggtgcgcggcctcaagcgcgacggctggacggtgttttacttggacgctcgcgacggcgagctcgatctttccggacttgatcgcatattggacgaggttcccgacgtagtgttggccacggtgatgagcgtgcagagcgaattggggtaccgcttcccgatcgaagacgtcgtccggcgttgccgcgccgtcggctgcgcgagaaaaacgcgcgggccgctcgtgcacaccgacgcggtgcaggcgttcgggaagctgcccctcgacgtgcacgagctggacgccgacctgctgtcgttctgcgcgcacaaggtgggcggtccgaagggcgtcggcgcgttgtacgtgcggcgcggcacccggctgttcaccacggcgttcggcggcggacaggagcgcgggctgcgctcgggcaccgaggcgctgccccttatcgccggcttcgccgaggccgcgcgcatcgcgcatgccgagcaagcggcagcattcgagcgcgcttcgaccttgcgcgcgcatgtggtcggcgcgctgcgccaccgctacgccgacgtcatcgtgaactcgcgcgacggcgggtctcccttcatcgtgaacttctcgctgccgggcaccgacaaccgcgcggtgcttgcggatctgagcgacgcgggcgtgtttctctcggcatccatggcgtgcagctccaaccacaccacggtgcctcccggcacctggcgcgagaagcatccgctggcattgcagctggcgggcgtgcccgcctcgctcactcggtgcacctatcgcctcagcttcagcgaccgaaccacggttgccgaggtcgatcggttcctggaagaactcgaggaggtggtgcccgccgatcaggttgcacgttctgcatagtcatcgtacgaggaggaggaaaccaatggagaaccgctccaatatcgctgcaccgggcggcatcacccgccgcagcttcgtcaaggggggtgcggcggcagccgctataggcgcgaccggcgcgctcgtcgggtgcgccccgcagggggacggcaaggcgtcggacgccgcggcgccggccgaggacgagggcgtgtggctgccctcgcaatgcaacatgtgcttcaacgcttgcagcatcctgggccatgtggtggacggaaagcttgtggagatcaagggcgacgaccgcagtcctgccggctggggccatctgtgcggcaagggcacggcgggcatcatgcagctctacgacgagaaccgcatcacgaagcccatgaagcgcacgaacccgaagaagggcgtcggcatcgacccggggtgggaggagatcagctgggatgaggcgtacgatctcatcttggagaagctggacgagcagaagcagaagaacaagcccgtcatcgtgttcgcgctgatcacgagcatcatctcgtggatcgactccatgaactggctgggcagcaacggcaacattcctatcccgttcaaggccgatatctgcggagcgcccacgcatcccatttcggctctgctgaccggttgcggcaacgcgcttcccgactacgcgcactgcaagtacctcatgcagttcggcacgcaagcgggcgtggccacgcgtcatggcaccagcatcacggcgaaggtgttcgccgacgcgcgcgcgaacggctgcaagctggtgaacttcgacccgcatatgtcgggcgcggccgagaaggccgacgagtgggtgcccattcgccccggaaccgatgccgcggtggcgctcgccatggcgaacctgctggtgaacgagtacgacctatacgacaaggagttccttgccgcgcgcacgaacgggccgtcgctggttgatccggccacgcagcgcatcgtgcgcgacgcgtcgaagggcaacaaggcgctgtactgggatctgtccgacaacacggcaaagccctacgacgaagtcaaagagcccgcgctcgaaggcgatttcgaggtggacggcattccggtgcgcacggcgttcagcatcttcaaggactccgtcgcgaagtacacgcccgaatacgctgaagaggtcacgacgatccctgccgacaccacgcgccgcctggccaaggagttcggcgaagcggcctgtatcggccagaccgtcgaggtggacgggctcacggtgccctaccgccccgtggccgtggacacgttctctggcattgcgcggcacaagcatggcttcatcacgcactgggccatcctgcagctgaacacgctcgtgggctcgacgttctcgcgcggcggctacctgggcttctacacgcgtaacaagtacgggttctacgagggcgacaaggatcacgcctgggagttcaccatttgggaagaggacggcctcatcgaggacctcaacatggcgcacggctggccgtcgaacggctcgcattacaagcatatccgcgaggccagctacacgcccacgtccgaggcgatggaggagctgcagcccctcacgatggatcagcatttcggctacatcgcccaggtgcagccggaggtgtacggcaccgagccgtccgaggtggcgttctgcatggcgtcgaacccgctgaagaactggtgcaaccacgactaccaggccaaggtgctggaatcgttcgactggatcttcggcatggacatctatctgaacgattcctcctactactacgacctcatcatccccgagccgtgctacctcgagcgctttgacccgctgccgttgtcgttcaacaaccaccgcgtgcccggcctgcccgaggtgccctatatcgttgccggtcgcatgcccatcgttgaggccaaggacaactgcccgtcggcgctggacacgttcggcgcgctcgcggcgaaggcaggcaagaccgccgagtactctgcagcgctcaacgactactacaagcttgccgacgagtacaagcttgacggcaaggagcagatcacggctgagcgcgtgtgcgacgccgcgctcaagtcgttggcgggcaaggatcgcggcatcgactggttccgcgagaacggcgtgctgacgcgcgagcgcaaggccgacgaggtgtacgtgttcgcggcgggcatggaagggcgcatcccgctgtacttcgacttcatgcttgaagcgaaggagaagatcgaggccgaggttgacaagctgggcatctactgggagacggacgattacatcccgctgcccgaattcatgccgtgcctcgaccacgaggtggaggaggaaggcttcgacctgttccccgtgtactggacgaacgccatcaacaccgatacctggcaggtggagaacgcctggatcaacgagatcaacgagctggacgataccacgtacttcttggagatcaacgcggcgaccggtgccgccaagggcatcaaatcgggtgacaaggtgcgcctgtcgaaccgcgacggcgatgtggtggaaggcgtggccgtgctcaccgagttcgtgcatcccgaatgcgtggcgtcggtgggcggccatctgaacgcgaaatccgactaccagcccatcggcaagacgaagggcacggcggtgaaccacttggtgcccgcaggcgatccgaagcgcatggagtacgtcggatccggcgtggaccagtgcgtgcgctgcaagctcgagaagatttcctaatccccggaaaggaggatgagtttcatggcctatgggttcgttatcgaccttgagaaatgcgttggctgccacggatgctcggtggcgtgcaagggcgcgaacggcacgcccccgacggtgactcgctcgcgcgtggaccgcggcaccgaaggctcctatccgaacgcggtgcgcaccatccgccccatgctgtgcatgatgtgcgagaacccgccgtgcgtggcggtgtgcccgcagggcgccaccaccatccgcgacgaggacggcatcgtggtcatcgacaaggagaagtgcatcggctgcaagagctgcatggaggcttgcccttacggcgcgcgttacctcgttcagagcgaggatggctatttcggctccgagttgaacgaatacgagagcgtcgcctatgagaacatgccgaagatgacggtggacaagtgcgacttctgcatcgagcattccggcgacggaaagcccgatcccgtatgcgtgaaggcgtgcatggcggaggcgcgcttgttcggcgacctcgacgagatgaagaagctcgtggccgagcgcggcggcgaggcgtacctgcccgaagagggcacggagccccgtgtgttctacctgccgacgatcactgcgtaagcgtttcgcgtttccctccctccattggaagccgcgccttttggcgcggcttccggcatgtttcgttatgcaacgcaaacggtttcgttgtgttgctaaaaacaacgattgcgggatcggcgcggctctgcgcagcgttttatcgacctggcgcttctgcgtgcgtcctgcctctccttcccggtgcgggcggcgcttcgtgctatactgtgcgccgaacgaacgggggagcgcatggtcaacataccgagccccgccctggctatcgtcgggcggcataattcaggcaagacgacgctcattgagcagcttatcgccgagctggtgcgacgcgggcgcgacgtgggcagcgtgaagcatcacagccacgtgggtttcgacatcgactatcccgggaaggattcgtaccgccaccgcgccgctggcgcgcgcgagacggtgatcgccgcgcccgggcagatcgcccgcatcaagtccgtggagggcgagatcgagtgctcggacatcgtgcgcagcatgcccggccacgacatcgtggtggtggaggggtaccgcaaaagcgggctgcccaccatcgagatcatgcgctcgggcaacgacgccgacgcgcgggtggccgacgtgttcgccgagggcgcgcgctgcggctggccgttgggcaccgacttcacccagttcacccgcggcaccgtgcctccggccgacgacgatgcggcgcgcgaggagctgagccgtgccgcgcagcgggtcgagagggcttcaggagaccatttcaagacgcagcatcccgactacgccgacatatcgaacaagctgccgacgtcggacacggtggccgtcgtcaccgacatcgaggaggcgcgccatgccgccgagctgtaccacgtgtcggcgttcgcgctcgacgacattgctggcctcgccgacttcgtggagcagcgtttcgtgcggccgcgcgtgaccgtggtcatccaggcgggcggcgagagcaggcgcatggggcagagcaaggcgaccgtgccgttcgcgggccggccgctgatctgccgactggtggagcgcctggggccggttgccgacgacctcgtgatcaccacgaacgagccggagcgcctggccttcctgcacgccgagttcccgcagtaccgcatccagctggtgtgcgacgcgttcaacgtgcgcggcgcgctgccgggcctgtacacggcgctggaggctgcgcgcaacccgtatgtggccgtggttgcctgcgacatggtgttcgcttccccgtcgctcgtggtggccgaggcgctggccatgaacgagacgggcgccgatgtggtggtgccggtgaacaagcacgggttcgagccgttccatgcgatgtaccgccgcgcgggctgcctgccggccgtgagcgccgcgctcgaccgcggcgagaagcgcgctcaagggttcttcgcggacgtagaggtgtgcgagttcccgcaggagcgcgtgctggaggccgagcccatgggcggctgcttcatcaacgcgaacacgcccgaggagctgcgcgccatcgaggagacgtttctcgagaagtagcggaagacgagacgaggaattggcatgccgaacctggtagacatcgtggaagtggccgaggcgctggagtcgaaggccgtgtacctggcgagcgatcgctgcgtggtggtgcgcaaccgccatgcgtcgtgcgcgaaatgcgcggacgcctgtccgacgggctcggtgttcgcggccaacaacgtgttggagcttgacggcgagggatgcgtggcgtgcggcgcctgcaccacggtatgcccggtggaggcgctcatcccgttgcgcccgctggacgaggacctcgcctccagcgtggcgtccgccgtggcggcaaccggcgggaaggccgtgttcgcatgcgcgcgcatagcgtcgaagcgcctggccgacccggcgaagtacgccgaagtgccctgcctcgcgcgcatggaggaaagcgtgctgctgggtcttgcggcgcgcggcgtggaggatatcgtgctggtggacggcacgtgcgccacgtgcaagttccgctcgaacgtgccgggcatcgacgccacggtggcttcggcgaacgagctcatggctgcgcagggctcggacgtccgcgtgcggcgcgcgtcggcgtttcccgacgaggtgctgctcgaagacaagcgcacgctgctgggcgagtcgcgccgcggcttcttcacgagcgcgcgcacgcgggcgaaggacgccgcgggcaagacggccgaggtgatggtgttcaagaacgacaacgctgcgccgtcgctgcgcgagcggctgcgcatgtccgacgctggcacgctgccgcagttcaacccgcagcgacgcatgctggtgctggatgcgatggaccggttgggcgcgccgacggttcccgagatcgacacgcggctgttcggctcggtatccatcgacacgcaggcgtgcagctcgtgcaacatgtgcacggtgttctgcccgacgggcgcgctgcgcaaaagcgagctggtgcctgcggagggggagggcagcttcctggagttctcggcggccgactgcgtgcagtgcaacctgtgcgccgacgcgtgcttgaagagctgcctgacggtgaactcgacggtgtccaccgaggagctgttcgacttcgaaccgcggctgatccatctgccgaacccgcccgcgcggcccggaatattgtcgagcttgaggcgatagcggtcggaagggctcatcatcggcccaaagacacggaattcggctcggaagcgtgttttcgggccgatgattcgccctcgcctgttctttgcgggtttttcggctcgatttctcaactgtatctttcttttgtacaaaagttactgtataaagaagtgaaacagttgatttgtcatagacggagcagcatcatgaacagcgatttcattgttgcggtgcacgcgctggtgtatctgaaccataaggcggacatcgtttccagcgaggctttggccaagaatatctgtacgaacgcggcgcgtgtgcgcaaggtgatggctccgctcaagcgcgccgggttcgtgaccacgcgcgaaggcaacgtgggcggctaccgttttgcaggggacgcttcggcggtcgacctgcacatggtggccgatgcgctcaacatcagatttgtgcaatccggttggcatagcggcgatatggacatgaaatgccttgtggcatccggtatggcgggcatcatggacgacatattcctcgatttagacgagcgttgccgtgaacgtcttgcgcaaatatcgatcgccgacatcgacgaccgcatattcggctccgacggcgtcgtgcctttcgatggtcggccggcatcgtccggcgcagagggctaggaggagatcatgggcttctccctcgaaacgagcattcccgtgctcaccgtgttcgtgcaaggcctgctgagcttcttctcgccgtgcgtgctgcctctgattccgctgtacgtgggctatctggcaggcggcgcaggcgttgcgaacgatgacgggaccgtcgagtacccgcgtaagaaggtgttcgtgaacacgctgttcttcgtcgtgggcgtgagctttgcgttcttcctgctgggcttcggattcacggcgctcggccagttcttcaccggaaaccagcgcgtgttctcgatcgtcgccggcgtcatcatggcggcgttcggcctgtacatgctgggcgcgttcggcaagacgaaggcggtggagaaggagcgtcgtctgccgtttcggctgaataggttcgcgatgaacccgctggtggcgctggtgctgggcttcacgttcagcttcgcgtggacgccgtgcgtgggtccggtgctggccagcgtgctgctgatggcgtcgtcgagcgcttcggccgcggcaggcttcgggctggtggccgtgtacacgatcggcttcgtgctgccgtttttggcggtgggtctgttcacgggcgaggtgctgcgctttttccgtacgcacggcaacgtggtgaagtatacggtgaaggtgggcggcgcgctgctcatcgtcatgggcgtgatgaccgtgaccgggtggatgaacggcgtgaccagctatctgtcgtcgttcggcggcgcgcccgctgcgcaggagcagccggccgaccagggcgcggatgaggcgaagggcgacggggcgaacggcggttcgtccgatgcttccgatgcgggcaaggatgccggctcgggcgatggcgctgcgagcaaggccgatgcgcaggcggcgccgctggccgacctcaagctggtcgaccagaacggcgaagagcactcgctggacgagtaccgcggcaagacggtgttcctcaacttctgggccacctggtgcgggccgtgccagcgcgagatccccgacatcgagaagctgtaccgggatcgtggcgagaacgagggcgacctcgtggtgctgggcgtggcgaatcctaaaaccgacagccgtcccaacaacagcgacgtgtccgaagccgacgtgaaggcgttcatcgacgagcggggcattacgtatcccgtgctcatggacacgacgggcgagatgttcagcggctatcgcatcttgtcgttccccacgacgttcatgatcgacaaggacggcaacatcttcggctatatcagcggcatgctgacccccgacatgatggacagcatcgtcgagcaaaccatgtccggtgtgaggaagtagcgctacgccgcccgcccgccgcttcgcgcggcgcctccgtaacgcggatgtttcacgtgaaacatctgttcgtaaaagggatcctgcgggatcccttttcgcgctctgctgctcgacgcggcgtattcgcaagctcttactttacaacgtaaataaaacacgttaccattcactttacgttgtaaagaaaaacgaacaaggagggactatgggagagtacgacgtatcgcgtcgctcgttcctgaaggggatcggcttggcgggcctttctgctggtacgctggggacgctgggcgcgacgggcatcgccttcgccgacgatgcgcccgtcgccgaatcggtggacgcgtatcggcagcttgcgtgcgagacggcgcttgtgccggtgaagaaggcggcatgcccggggccgcgcgggccggtcggcttcgaagaccgcgacatcgccgcgagcgacatcgcttcgaccgaggattgcgacatcgtggtggtgggcgcaggtatcgccgggctcatggccagcctcaaggcagccgaagagggcgcgaaagtcatctgcatcgagaagatgacgaagggccgcggctgcttcgagtgcttcggcgccgtgggggcgaagtgccaggagggcaccgagatcgacaaggtggcgctgttggacgagatgtaccgcagcgcgtactggcgcgtgcgccccgaacccatacgcacctacgtcgaccgttcgggcgaggctaccgatttctggcaggccgaactcgacaagggacagaacggcttcgtcatctcgaaggtggagcaggctccctccacctgcggcatgccggcgctgaccccgctcatcgacacggagctgggcttctacgacagcccctcgctgccgcccgacgccggagtgcgctccggctattcgggcatctacgtgtgcctcgagatgcaagaggtggcgaaggcctacgacaacctcgacctgcgcttcagcacgccgggcgtgcagctggtgcgcgacggttcgggacgcgtgggcggcgtcatcgccaagagcggcgacgagtacgtgcagatcaacgccggaaaaggcgtgatcctggccacgggcggctacgatgcgaaccctgagctcatggaagcgtggacgcgtccggaggattatgcctcgtcgagttggtggaaccccggttggggcaccacgggcgacgggcatctcatgggcatcaaagcaggcgcgcagatggatccgtgccctcagccggtgatgaacttccgctggggcaatcccgattcgttctacgacgcgcgcacgtggaacgccgtgtacttcgccctcatggtgaacggcgacggcaagcgcttcgtgcgcgaggatctgcccttccaaagcgtgtcgaacgcgcagaacgcccagcccgacttcgggaagagctgctggcaggtgttcgacgataccatgttcgagggcatggaggacgcggttgaggagttcaagcagaagggctggctgttcgagggatcaacgcccgaagagctggccgccgcctgcggcgtcgacccgcagggcctcgccgacaccatcgcgcggtacaacgggtttttcgaggccggcgtggacgaggacttcggacgcgacctggcgggaaccatcccgttcacgggcacgcgcttcttcgcgctgaccacgaacagctgcgtgctcgccacggtgggcgggctcaccatcgacggttcgtgccgcgtgctcgataccgacgaccgggtgatcgaggggctgtacgccgtgggcaacgcgtcgggcaacttcttcgccggcaactacccccgtcatatccctggaacgtccatcggacgcgccgtcacgttcggctacgttgccgccgagcatgcggtgaaaggagcgtaaagccatgttgaacgtcaaacgatccacggtaggcgcgttgtcgacggttgcgcttgtcctttgcctgaccttggggttggcggcatgtgcgccgcagacatcagaacccggcgccgatgcggacggctcgtcggccaagacgacgcagaccgctgccggcgacggcaccggtgcgtatgtgtccgacgagcagtgcttgagctgccatggaggctcgtacgaggcgctggccgagaccacttcgtcctacgagcagagcaacccgcacgactccctccacggagggtacaactcctgcgtgaactgccatgcgcgcgacaaggagatcaccgacaaccagtgcatgcactgccacgattggccgcataatcccgcggcgtaacgccgatcggcctgttcggaagaggagccggagcgagcgcgcttcggctcctcttggttttcgcatgcgaaggaggcgggagggctcgcggccgggcatgctcatgctatgctgggcgaaacgaggtgctggcaggagggacgcggcgtggatgcggaaaccgaaaagaagcggaagagcgggctgacccgggacgtcatcgtggataccgcgtatcgcatgatcgatcgcgacggcatgggcgcattcacgatgcgtgccctcggcgcggagctgggcgtgtcggccatggcgttctacgcgcacttttcctcgcgcgaggaggtgctggtggcggtgctcacgcgcttcatggaaacgctcgacaccgatccggtgccgggagagcggtgggacgacacgctgcggcgcacgatgacctccatccatcgggagtactgcgcgcatccgcacatgaacgatatcgacctcgatccgaacatctcttacgcgggtttggcggcccacaccgagaagatcgtgtcgctgcatctcgaccagggtatgcccgagcccgtgctcacgaaggcgtgggccatggtggacgcctttctcaccgggttcaacggaagcgcgatcgccgcccagaagcgacggctggcagacgaggcggcgggtggcgcgacgcgcgacatgcccgtgtggcagcgcatcgtggattcggcgtactcggaagagtcgttcgcgaacggcgtggagatgatcatcatgggtgtgcgtggcttggcggcacccgacccgtgcgagtggcataccccgaaataatgccgcgccccggggaggtcggggcgcgggtaggatgctgcgcgcgggaggggagggcgcgcagcttatgaggggaacgcgttacttggcggccacgagcttgaccacgtgcagggcctcggtcatcgtgcggccgcaggcgacgccgtgcatctggtcggggtagttgccgctgaagagcgaccccgagcagtcgccggcgcagtacaggccctcgatgggctcgaagtcggtgttgagcgcctggcagtcggcgttgatgcggacgccgtcgatggtggtgagcagcgtgccgcccagcgtggcgccgaagaacggcggggtgcgcagctcggaaaggcggtagggctccttgccgaagtcgacgtcttcctggttgtcgtacagctcgttgtagcgctcgcaggtggcgaggaacgtcttcttggcgtcggcgtcgaagccaagcttgtcggcaagctcgtcgagcgtgtcggccttctgcaggcgaccgtcggccagctccttctcgaagtacttgtccaggtcgtacgtgccgtcttccttcttcacgcccagcacgcccgtgcgggtgccggccgagcagccgagggtgtggaagcgctgcacgtcgtcgccgaagttgccgtcccagacgctgatgtacacgccgccgggctgctgcgcggccgcatggggcaagtagtcgtagtcggcggactcgagggcgaagcgctcgccgcgcaggttcaccttgaggaagggctgcgtgccggggttgaactggccgttgcccggccactgcggattgccggccttgacggactcctcggtgtagcccgcggtggtgccgggcgcgacgaggccgcggtcgaagatcatcgtggcgctggtgatgtctttcaccgcgcctgcccacagcgccgccttgatgccgtcgcccgtgttgttctggttgtagcccagcgcggtcaccgacgcggtggtgatgggggacagcgacgagagcatggcggggttcgcggagtagccgcccgtggtcagcagcacgcccttcttggcgttgatctgcgtgtagccgttgtcagtcttgaagatggcgccggtaaccttgccggaatcctcggtgaccagcttcaccagctcgtgcttgtaggagatctcgtagccgttgtcgttcatgaccttctcgaacagctcgttgcgcacggggacgccgtcgcggccgccctcggcgttgccgtagtggtgctcgccgcagggggtgtagaagggggtggcgcccatgccgcccggcatctcgaactcgtcggcgatgaccacggcgccggcttcgctcatgtacttgtcgacgtactcgaacatgtcgttgctctcgttcatccacatgttgatgaggttgtggtcgcacgtgccgctggaatagcgagcccactcgccgtgcaggcgggcgcggtcggtgtggtagccctggtcggtgaagggcttggtgtcgacggcgttgaaccagtggcgcgtggcgcccacctcggtgcccttctcgcataggatgaagtccatcttctggtcggatgcgtacgcgccggcgatcatgccgccgttgcctgcgcccacgatgagcaggtcggtgtccttcgtctcggtgatgtcgccgatctccggcggggcgcccagccagtcgaccgtgatggcggcgctgccgtcgtccacggccaccgcgttgttgtcggccacgcccgtggctgcgctggcagagctggaagcgctctcggctccggttgtacccgcggccttgggcgagcagccggccaggcccatggcggcaagcgcgccgacgcctgcgacgccgcccaggaagctgcggcgggagatgccgccttcgttcgttacgttcgttcccatgatgatcctcctaatggtgcgatttgttttgcggctccggatgaggagccgcttccctcgacgtgcactctacggcgttcggcgaggcttgaaaccaccccgtcgggggtgtttcggctggcgaaaggcgagttggcgcgctccccctgcgagggtgatttgagggcgataaggctgatgaacgtggtggatgcggggtgccgtgatcggatggcgcaggtttcgcttacaatgggagcaagcgatgagggggagggagccttgcaagcgatggtggaacgtatgcgcgattcgaagcacggcgaaagcgcggctatagtggtgtgcgtgatcgcctttgcgatcatgggctgtgtcggcggcattctgaacgcgagcgtgtattctcgcgtggccgaatactacggcatcgctcgggagatttccacgatgacgtcgggctttctgttcttgatcttgtttctgatcgccacgcgcaagccttcgctgctcgatcggcgcttattaaccgtggtggcgctgggctgtgcgatcacggcggcgttcgtgctggagttcgctctgcagatggcgaacggtccgctgacggtggcgggcttcctgttctacaacacggcctccgcgtgggcgtcgatcatgatggtttccgcgttctcgtcgttgcgttcgtcgaaggcggcgcttgcgggggtggtgtgcggcatggcgttgggcgaagtggtgcgcgtggcgcatcctccggtttcgttcgagctgggcattgtcgaggcgacgtgctcgtacgcgctgatcatcgtgatgctgtatcatcgaggcgggcgacagctggacgcgatcgcgcgcgaagcgtccccggccagcctcgaactgtccaatccggaatcgttcttgcggcctgctcacgcactgtttttatgcgtaggattgttcagcgttgcgacgggttacggactcacgctcaacgaagtgtcccatgctcctatcagcgtcgatgtttcggcggtcgtgctggtgggggtggccgcatggatgctgctgtcgcgcagcgagagcaaggaggacatgctgttctcgttcgcgatgctgctggtggtggccggcttcatcatcgcgccgttcacatttttgacggatctgccctcggcgaacgcgcttttgcgcatcggcgtgcgcagctttgacatgctggtgtggcttgtggtgttggcagtggggcggcaaaacctgttggctttgttgccgacgttcgcgcttgtgcgtttcatgagcgcggttggaaccgacgtgggcgcgattgccgggcataccacgaacgatatcgtgggtacgaatgacgatgcagccatgctcatcgccgaggtcgttttgttcgcgttcgtcgcgtttctgtggttgggattcaggaagttcagtttcgccgacacgatccgaggcgtggtgaacgtgggtgagcgcgaggctgggccggttggggctgctgctgccgaggcagtcggcgaggtgaggtttggcggcgctggcgagacggtgcggcagctcagcatcgaggagcggtgcgttgagctgggtgcgcagcacggcttgaccgagcgcgagacggagatcttcgccatgttggcccgcgggcgcaacgggcagttcgtcatggaacactacgtggtgtcgcgcaacacggtgaagagccatgtcaaacatatctacgcgaagttggatgtgcattcccagcaggagttgatcgacctggtggagcgcgcgggggagtagtgcggggtaacgctgtactgatagtggtacatgctgcaagcgttgtgcgccgtcgcgaagaagcctgtacgttgtttgcggggtcatggtgaccccgtaagaatcaagaggttagctaaccgcccaatcgaggtgttgtcggcaacattgctcgataagcgcggttatgtaaagtcgagcgaactcgaggcttccgacctcgcttttctagcgccggagctcacgagcgaggccgagggcccggtccgggcgccggcccgcgccgacgggcgctggggctaccgcttcgtgaagcgcgccttcgacatcgccttctcgctcgtcgcgatcgccgtcctcctgatcccctcgatcgtcctgtgcgccgccatccgcctcgagagtccgggcaaccccctgtactcgcagaagcgcgtcggccgcatcggccgggacggccagatccgcaccttcgacatgtacaagttccgctccatgcacaaggacgccgacgagcgcctggcggagctcgccgacctgaacgaggccgacggcccgctcttcaagatcaaggacgaccctcgcgtcacgcgcatcgggaagttcatccgcaagcactcgatagacgagctgccccagttcctgaactgcctcatgggccagctctcctgcgtgggcccgcgcccgccgctgccctccgaggtcgcccagtacgacgagcgcgccatgcgccgcctctccgtcaagcccggtctcaccggctactggcaggtgaggggcaggagcgacacgaccttcgacgacatggtggacatggacctcgcctacatagaggagcgctcgttttcgaccgacctgcgggtgatcgcgaagacggtaatcacgatgttcgacggcaagggggcgtgctagatgggcgacgggatcaagcacgtatacatcgtcggatgcaagggcatcccggcccgttacgggggcttcgagacgttcgtggagaagctcaccgagaaccgcgtctccgaccgcatcaggtatcacgttgcctgcgccgtcgacgagatgccgcatgagcccgagtacgagcacaacggcgcccactgcttctgcatccgctggcgcccgataggggccgcgcgggcgatcgcctacgacctcgacgcgctttggtgggcgatccgccacgccgagcgcaccggcgccgagcggcctgtcttctacgtgctcgcctgcaggataggccccttcgtcggacgcttcgcccgcaggatacgcaggatgggcgggaccctcctcgtcaaccccgacggccacgaatggatgcgcgccaagtggagcgcgccggtgcgcaggtactggaagctctccgaggcgggcatggtgaagcacgccgacctgctcgtctgcgacagcaggaccatcgagaagtacgtccgggaggagtacgcgcgcttctcgcccgagaccacctacatcgcctacggcgccgacgcggccccctccaagctcgccgacgacgaccccgccttcgcgggatggctcgagaagaacggcctggagccgaacggctactacctcgtcgtgggccgcttcgtccccgagaacaactacgagacgatgattcgcgagttcatggcgtccggcacgaagagggccttcatcctcgtcacgggagtcgacgaggggttcctcgacgagctgcagaggcgcacgggattccggggcgatccccgcatcaaattcgtcggcacggtctacgaccaggagctgctcaagaagatccgcgagaacgccttcgcctacctgcacggccacgaggtgggcggcacgaacccgagcctgctcgaggcgctcgcctcaacccagttgaacctgctgctcgacgtcggcttcaaccgcgaggtggcccagggcgccgcgctgtactggacgaagggggaggggtcgctggcgaggctgatcgagagagccgagcgactttcaattgacgagctaaggcgattcgatcaaaaaacctcgatgatcattcacgataattattcttggtgctcgatcgtcgcctcctatgaaatattttttttgggaggaacctcggtttgagaattgattctttagcagaagatcgaatttgcgcgagggccggcgtcggtatcccgagtaccgggactggatcgcatgtgctaaaggcaagtggcaaagacagagatctcgctatttgcagtaagatcatcttcttcatactgattgcaaccgttggtatcgattttctaaatgggctcacgagtatagatatcttagggcaactgattcgcgtagcctttttcattttgttgttgtacgtagaactgcgtatcgacaaaaagggatttttcgtaattcttgcggcgttgttgtattgcgttttcgtcatgcttgcatcgtttatggccgacggcacaatagggctcagctccttaacttacgagattggcgtgattgtcaagttattgctgttcttctcgatattcagagttgttaccaagcttaacgagtgcggctatattcctgtttcgtttatcgacagtgtttttaaagtatccgcgatttatgttccaattctatatttgggtacatccatattgggcataggcgtttcaagctattcgggaggacagggatttaagagcgtattcctctcccttaatagcataaatattgccatgctccttctttatgcgttttgccttgagaaatgctttgcagagagaaaggctgcatgggcaccggtagcattgcttaatgctgtttctctttttatgctgggcactaagtcaagtattgttttcgtcttggttctttttctcttttatctaattgcaccaaaaaggaatcgaacgagaaacttcatattgggtttgctgatttctgcagtattctacttcctttttcttcaggttgactatttgcaggctttacttgcttccgtttcggaaagacaggcctatctttttgaaaatagaaactttatcgactatttaaccagcggacgaacgtggatgctgggccatgcgattacgctcctctcctccgacatggcagatccgctgggcgtttttcaacttctattcggaaacggatattattgcttccataatgttctctccgagatatcggggtatctgagtacgtcgatagtgcgaccgattgagtttgactgggctgatttgttcgtgtcttatggcttcatcatgacgtttttcgtgtatggctttcttcttacgtggttgatgaaaattgtgcaaagttccaaaagaagccaagccggtttctatctaatcgctttcggtgtcctattcgtttttagctgcttgggaggacatgtaatgtttgaaagcatatcgtctacgtttcttggactagtgcttgctgggggagtcttgtcaattcgcgacaattctaaagcgcgccaaaagatagccggcgccccctcttgtcgcgttgaggcgaaagcgaactagcatgtcgaatcgaaagagttgcacgattgatcgcgtagtgcatgagctcatggtcgatcgtaaaaggcttgcgaaactcggagttctcgactcttttattaagcgcaccggattcgatctgtttatcaaatacggcatcgtgctattcaattccattgggacgaaagaaagcaatgcgctcgtctttgtggacgaggttaacaactcaaacatgtttaagaatttgcacgctacgaaaagcgatctggacaagcacgaagagacgcgcaccttatctttaagaaaagtatgccgctcgaagcacataaggatcggaatattatggcccgtcatccagctcttccaaactgtgttcgcgggagctgcttttgctgtggttttgtcgatcaggaaagaaaacagcaagtacgaatacagcatgctcagatatttaacaaacgcttttagtaattttctgaacaaactggatgctcaggcgaagttataccttctcatgagcgatcatcacttcttttcttccatcgtcgcactgcagtatccagagaagtcatgtgtgctgcaacatggactcattcaagataaagcctttttcgaacccattcgggcagattattttttcgcatggggcaaagcaagttcgaatttgattggtgataagagaaaggtttttatcacaggtacaaacaaattcgacgaatgcctaagggtgcaaagatcagctatcaaaagtccgccaaagaaagttcttgtttgcttggcaacgagtcgcagcaaggaagccattgagcatacgctcaaacccatatttgagcttcaaaaccgcttgaagttcgacctgttgataaaaacgcatcccggaagccaattctccatggatgaactcattgaggcggcgcagggaagaatagtgaatttgtataaagacgaagcgatcgctgatcttgattttgatttcgccataagcgagcaatcaacatctctccttgatttcgcttgcatgaatgttccgtttattctattcgatgaggtcgatgactcgtatttcaggcttaacgatgctgtacctacggcgcatgatgctaaggatatcgaaaaggttcttcgggacttcgatcaggaagcgtttgttgccatgaagaaacgcttcctggagaacgagttaaatggtggagtgaatacaatatatgaaaaaatcgaagagatactccgcgcgtctcaaaacacgaatgacaacatctgatgatcaagggaaaagagatcatcaaagggctggcgggttattcgttaaccccaatagcaaccgcattaatgactatactggccatcccgttgatttcgaatttttaccctgcagaagaatacgcgaaaataagcattttctattccgttggcgccgtagtctcaaactttgcctttctcggactggacagttcgttcattcgattcttttacgacccgccgaaatcgttaagtaataagacgatggcgctattggcgctatgcgtcgctactgtagttaattgcacgctgatctttattattttgctgacctgccccaagatggcagcggttttgctgtttggggaaagcaatacccccgcgctgattgtgctgggtgtctacatcgcgggttcaatcgcatttagaatgtcaaacacgattgctcgcatgcggtcggaggtgcgcgattacaacctgcagcagattcttcaaaatctaatatcaaaatttctttttgcaattgcagtgctggtttcaacgaatttctttccgtcgatcgtggttatggcgctcggcactattgctgtttcgacatattttttgactaaacaaagagagaacttcggtctagacggcagccacccaagtagatcagatattaagctgctatttgcttttgggataccatgttgcataaacgggcttgtcctcatactctcaacatctatcggaaaaatcatccttggttggctagggctttttgaagacgctggcgttctggcaatagctatgactatcgcttctgccttttccctacttccacaggcgttttcgctctattggtctccttttgtatacaagaatcatgctgcagaacatgcgagaatacgcgagatgcacgactacgtcatggctgccgcgctcgtagccacgtgcgtaatcgtggtgggtcaagatgcactctatatgctggtaggcccaggatacgcttcatcgcaatcctatttcatgcttctaatgaccgcgcctatagcaacccttatatgcgagacaacgggctacggaacaatgctcgccaacaagcctatatacgttagcgttatatccataatcggaataatcatcaatgctttgcttacgtttgttctggcatcagtcttcgggggttttgctgcgggagtcgcggtatgcgtttcatcgatttttatatgtcttgcaaaatctataaccggccagcttttctacccttgcatcaatagcattgcccgttcttccatatccgcaggcgctatcttgctcctctgtttaggaaattgccttttttacgattcatggggatacaaagccatctcgatagtacttacaagctgcgtactcgcgttttgctacagacgcgaaattggcaaagtgcgaacgctatttggagatcgataacttcagaaatgattagataaggctcggaaaggaaacccatgttaacaaacaagacaatactcatcaccggaggaaccgggtcgttcgggaacgcgttcgcccgctacgtgctcgagaactacgaccccgagaaggtcatcgtctactcgcgcgacgagtacaagcagttcgtcatgcgcaacaaatttatcgcgctcggcaaggaggccggcgccgactacgactccaagctgcgattcttcatcggcgacgtgcgcgacgaggcccggctgcgccgcgcgtgcgcgggcgtcgactacgtcgtccacgccgccgccctcaagcaggtgccggcatgcgagtacaaccccatcgaggccatcaggaccaacatcgacggcgccaccaacgtcatcaacgcggcgctcgacacgggcgtcgagaaggtcgtggcgctctccacggacaaggccgtaaaccccgtgaacctctacggcggcaccaagctcgtctccgacaagctgttcgtcgccgccaacgcctaccgcggccgctcgggtacgacgttctccgtcgtgcgctacggcaacgtcgccgggtcgcgcggctcggtcatcccgttcttcgacaaccttgtcaaaagcggcacgaaggagctcccgataaccgacctgcgcatgacgcgcttctggatctcgctcgccgagggcatcgggctcgtggtgaaggcgctcgccgaggcccagggcggcgagacgttcatctccaagattccctccttcagggtgaccgacctcgcgacggccatggctccgaacctcaagcaggtggaggtgggcatccgcgagggcgagaagctgcacgagtgcatggtgccggcggcggacagcatgaccacttacgagtacgagaagaactacgtcatctaccctcatatggagtggtgcgacctgtcgaaggtcgatttgcgaggcggcaagaaggtggagtcggggttcgtgtacgactcggggacgaacgacgagtggctgtcggtcgaggagttgcggaagctcgtgtccggcatggagatcaagtactaggaggccggcgtggaagagctagcgatcaacgggggcggaccggttcgagagccgctgttgggctatgggcatcagagcatatccgacgacgacgtccaagccgtcgtctcgaccctcaagagcgattacttgacctgcgggccggccaccgagcggttcgaggacgcgatccgagaagcgacgggtgcccgctacgcagccgccgtggccaacggcacggcggcgctgcacgtggcatgccttgcggcgggggtcggcgggggcgacgaggcgatcgtgtcgcccatcacgttcgcagcctcggcgaactgcgtgctgtactgcggcgggacgccggttttcgccgacatagatcctcgcacgtggaacatttcccccgagtctattaggtctaagatcacaccgcgcacgaaggccgtcatcgcggtcgatttcggcggcgtgcccgtcgacctgggcgcgatacgggcgatctgcgacgagttcaatctcgtgcttgtcgaagacgccgcgcattctctcggatcctcctgggaggggcgtccggtgggcagcgtggcggatctgaccacgttcagcttccatcctgtcaaaaccatcaccaccggcgagggcggcgcggtgacgacgaacgaccccgagctcgccaggagcatcgtcctgttctcgaagcacggcatcacgagggatcgcgcgcagatgcaaaatcccgatgagggaggctggtgctacgagcagctcgagctgggctacaactatcggatgagtgatatccaggcggcgctgggcgtttcgcaaatgaagcgcctcgaaggcttttccaagcgacgccgcgagatcgtgaagtactataacgaagcgttcgcggatatccccgaggtttccttccagctcgatccagcacccagcgatacgacgcgtcatctctatgttctgcgttttggcgtggaagcgcttggagtcacgcggcgattcattttcgatgctctgcgcgctgaggggatcggcgtgaacgtgcactacttgccggtctatcgcctgccttactacgaaaagctcggctacgatcccgagtgctgtcccgaggccaaccgctactacgacgaggcggtcacgcttccgctacactgttgcatgacggacgacgacatgcaagacgtagtgaaagccgttcgtaagttgatagattggtgcaaggctcagggttaaggatctatatgttgatgacgcaatcgataagcgagatcaacgtactgttgttaaggcagctcagctcgttcttcgttttaagcgaagacgacaagaaggcagttgagcaaagcgtcccctgcgcgctggataaatgcgagagatccttttcgaaaaccaggaacaagtattacagcgaagcgggtgtaaccaaattcgatcctcttcatgggcgtcaatggtcgcgctttctctacgagctggctcgctgtatattcctt

SEQ ID NO: 51 - DNA, 27759 bp, Eggerthella lenta
  source 1..27759: mol_type = genomic DNA
ccggttgccgcgatccaaaggctacaagaagcaggaagcgctcgacggcggctacctcaacgtcaggctctcggccgacctgagcgcgaagctcgaccgcgactgcgccgactacgcgcgcagggcggggaagcccgacgcctcaagggtgcggggctcctacgtccgggagctcatctccgccggcctccaaggtgccgccgacgccgatctggaatcagcctcgagggcgatgaaatcggtggcgtgggagctcgaggcggcgtctatcggagcctcgctagcgcccacggccaaggccctgcagggatggagcgaccggctgatggaggcctccttgatgctcgaccgggcagcgggggagcgctagcgatgccgatgctcaagaccataaccggtcacacgggctgcgccggcgtcatggactacctgcgcaaggggtcgaaggacgacaggcgcaagcgccgcatgggcgagataagcgaggccgacacgctccgcgtggcggcgaagggcatagccggctacctccacgacgggcacggcgcggagttcgaccgcgccctcgccgaggacttcgtcgggatccctccgagcgcgcagggcgactgggctcggtacatggacgacctcaggcgtgccgccggatgcgacaggaggacgggcggaagggaggggaaggccgtcacctaccgccactacgtgctcgcgccagaccccgaggacggcatcgatctggacacgctcagggcgtacgcgaaggagtgggtggtgaaggcgttcggccccggagcgacggccgccatcgtctaccacgacgacaaccacgagcgcctgaagaagggcctgcagggaataccccacgcgcacatctgcatcaacgcgctcaacacgcagacgggcaggaaatggcatttcgcgaaagacgacctcgcccgccaggcgaacgtcgcgcaggagctcgccgagaagtacagcctggcgccgttgccgaaaatgaggacgtccgacgccagggaagatcccttgaagacgatgcgcatctgcaggacgaaggaggagtgcgcgatgctcgccaaggggttcgtgccttacaaggagtccatcaggaaggccgtcgccaaggcgtgcaggacggccagcagctgggaccagttcaaggcggccctcgccgacaagggcgtgagcgtgaccataaccaggagagggacgctgacgtactgcgactccaacgggcgcaaggccaaggagcagaagctcggcctgaacttcggcatcgtcgcggtaggggaggccatcaagcggaactcgtccgagtccgtatccctccccgacgtcgacgccacgccggcgacgtacgacgtctccctcgtgaggaggcgggggaaggtcgagtgccgtctcggcaccgagaggctcgtatggcacgaggaggcgggatcccgctggcagcacctcgacaacatcaagtcgctcgagcgcgcggccaaggtcaaggagatctacgggatagtcgacggcgaatcgtactcccgcaccctctcgcatctcaacctgcagctcgaagaagccgccaggaaccaggatccggccgccgcccggatccggtgcgagataaagagcgtcatgtacgcccaagccgttatagacctcgcgtccgcgcgcaagcgcataggcgacgaagcggtgctgtcgtattccgagtcgctgctgaggcagggccgccagctcggcgtggccaacatagagagcatcgccgccatagcgcgcagcaacggcatcgaccgcacggaaggatggcgcgccgcggtgctcgccgccgagcggatcatgtcgtcgagggagacggccctgcaggacgccctcgtcgaaggatcgtgggcgcgcgacgtcgcacgatacgcggaagcggtcgaggccatgcgcggcgtcgtcggcggcaagagcgaggcggcctggacgtacgaggacgcaagcgcggtccaggccggaacgatcgccgagagggccctcgagggcatcgccgagtccaggggcgagagcgtcgcggacgtcctttccaaggccgaggggatggagcgctccattggggcggccgaggcggcctacttcgacgcggcgaggaacctaagccgcgtctccggcgcgcgggacgcggcatatgcagtcgcgggcctggagccgccggcccgcaaggcggcgggcggcgaggcggtcaggcccaagccgcaggggcaggaatcccgcggccagcgctcgcgcctcgcagccgagatccacgcaaggcacctcgaagaggcgcgcaagaaggccgtctcgaggagcgcggcggcgtcgagggccaagcaggccgcctaccagtccgcgaagagccggaacatcgcggcgaacgtggcggccaaggaagggaggggcgcgtcgcggtagggacgtcagacctcggcgtcctcggcctcggcggcctcgtcccaataaaggtcgacctcggcgtcctctacctcgccgcccccttgcggggcctccatcggcagcacgtccttcagcctgtcgacgacgacgagctccccgaccttcaggtagagcaggccgccgaggtaccgcttgtcgagcagcttcttcctgacgaggaactcgggctcgcgctcgggtttcgggtcggggttcgcgccgatcctctcgacctcgtcgtcatggcagtagacgtccgcgtacagatggtcgtcgccggacatgaaggatccgacgttgaccctctcgtcaaccacggtcgggtgcctgtccgtgcccctcgagtccgtccacccgtccatggtcatgagggtggtgttgtactccctgtaccccaaagcccccgtcatcaccgcgacgttcacgataccgccgccttgttcgggttgcgctcggcccattccgcctccgcagccgccttgctgggccagaacagccatatctgggacgacgagtaggatcccttgtaggacagggtagcgggcgaggacgggatggatccgtcctcgttaggcgtcgtgtagaacgcgaactcctcgccggcgctcgcgttgggctgctcgccttccggctcgaagaacgagaccttcatgttctcgcctacctcccattttccgaacatcaaaggctgcaccagggtcttgtcgtagtagcgcgccgtgccgtcgccgttaagggtgagcacgtacgccttgtcgtactcgacatggtaccaggatcccacgtaccctccgctcaccgtgtcctcgggctccgcttcgggctgttgcgaggatacaacgatggcggccacgaacatcgccacgagggcgacgaccatgatggccgcgaaaaccacgccgccgtgatccttgacccagtaccccaaatcactcgctttgctcatcccgacctgccttgtagccatggtcgatggcgtagccgtacatgcgctcgaactcctccacgtccgccacgacagccaccgagtagccgttcttggtcaggtacgcgaaccccctcgtttcggagagccattcgagtatccttgccgaattcacgcggaactcggacaggggcacagccttcgccatcgatcctccaacatttcaggcccggtcttttcacgattgtaccaaattagctatcttcaaggtattaattcgtttcgaattgctggtattatcgatcacgacagcacataggaagaggagggcccatgatcggcgaagccggctacgaaacgtcagaagaaagcagcgacttcaaagatgtccgagaaatgcgcgccgataaaacccagacctggctgtctgcgggattcggcgacgacagcccccatgagttcgtcggaacgatcatgccggcttcccgcgccgccgagggcaagtgcgccgcgctccacaggttcgccaacgccgggggaaccctttactctgccctctacgaggacgggcaggagatactctcttgcgagcgaagcggcgaagggaagatgatatccgactacctcagccggattcacgttctttaacgcggagggaaggccggcgaaggccgctgcgcgtaaaaagttagcctaagtttacataatatgtgttatcaatttcgcacggccgtcccaattttaatattgaaattcgaactctaatcgcgtatgctagtcccataattaattgcgagatcggagcgtttggatatgcatccaaccgaatgcacgtttactgcaagcgggttcaggcgagaggaattcgatcacttcatgtccattgcccgcgagctgggaatcaaggtcgattgcgcagtttcatcgagcggcaagacggcgacggtgcacgtgtccgacatgccggacgtccaggacgcggaaaccatgaggacgcggcgcgcaggccgtccgagcaagggcgtggtgctcccacatgattccatatttaataatgagactacctgcgccgagtaccttgcatggcagcagaaccattcggtagaagaagggatgcggcaactcggcttgaagcgcacaacgtatttccgcaggctcaattcgatcaagaaggcggttgaagaggccgagcgcttgaacgcaggccgcaagaagaaaggcatgaagccgctgtgtccgctgctcgtgcacgtgcgctgacacttgaagcgggacgccattacgatcatgcgtggcatggcggtagataggagacatgggaatggaaagaatgacgaggagagggcaagcacctgtgaagaaagaattggtcgaggcatcgatgagcgccttcgtattctggatggggacgatcgccatcggctacatgctcgtcgccaacagcggatggagtcttcctttgtttcctcacatgctgctcctattgctcgtgttcgcagtcggatccgtcttttccacggcctcattcttcctcacggccgcgcgatacttgcacacccgtggaaggagagatcctggaaatctggacgactacccttccttgcgcacacatatcgcccaggtgcatgagcaagaaaatcgatgacgaacgagaatctgcgttgatcaagataccgctcgatctccacggttttctgaatctgcgccctggggagagcggcaggatggcgacggtgcgcgtatccgacatgccgtcagtctgggaagccgagactatgggaacacggggagcgcaggggctcgaccaaaggctctgttcttcaaaatgatgccatatttaaaaatgatactacatgctccgatcatattacatgacagaaaatgcactcatcggaagaggggatcggaatgcccggaaagatgacgaaccgcgagttttaccatgggactccggagcgcgatgccaagaccaaggttcgtggatacgtgggaatgaacaacgtgcgcttggtgacgatagagtacgacggcgagtacgtggacacggtgaaggagcgctactacggagtgtggctcgaccttccctgcgagcgcgaggaggcctactgaccgcacgacgaggaagcgataccctaccggcccctcccctttcttacctcatcgacaacatctgcaggtgcgaacagctcccatatttccactccaagggctgatgcgatcggctacgtaccgaacgatgaattggacacgatcgcaagaggcgtctacgtcagcttgccgaaagagctccactgtatgagcaacccgatccacgacggcatccgaaagcgcctcaacgagagccggagcggctaggatcccaaacactccacaaactgttcgattgcctccggcacccatgcgggcctacaattgtatcaaacatttgttctctattacggaggtaacaggtcatcatgccagaccgcgacgtcctgcacagcgacataaactgctgctacgcgcagatcgagtgccaggcacggcccgagctgcgcggcaagcccgtcgtggtgggcggcgacgaggaggcgcgccacggcatcgtgctcgcgaagaacctcatagccaagcgcgccggcgtcaagaccgcgatggcgctgtgggaggcgcggaaggcatgccccggcctcgtcgtcgtgccccctgactaccggctctacatggacgtgtcgcggcgagccagggagatctactacgattacaccgaccgtgtagagcccttcggacccgacgaggcttggctcgacgtcacgggcacccgccggtgcctcgggctctcccccgccgagatagcccgcgaggtaagcgagcgcatggtcgccgagctcggcatcagcgtgtcggtcggggtgtcgtggaacaagatcttcgccaagttcggcagcgactacaagaagcccgatgccgtcacggtgataacgcgggagaactaccgcgaggtcgtatggcaggcccctgtgcgcgacctgctctacgtagggcccgccacggagcgcaagctgcactcctcgggcatcgacacgataggccagctcgcgtgcgcctcggacgagctgttgcgcaacaggctcggcaagatggggttcgtgctgcgcggcttcgcgcgcgggcaggacgctaccgaggtcaagccctacgaccgggacgccgccgacgtcatgcgcgagatcaagagctacggcaacgggctcacggcccccagggacatatgcgacccgcagtccgccaaggcgtacgtctggatgctcgccgagagcgtcgcccagcgcatgcgcgagggccgcgccagggcccgcaccgtgtcggtcggcgcaagggccgcggacgacctctgcacccgatcgcgccagtgcaagctgccggtggccaccgacgtgacgctcgaggtagcgcgcgccgcttggggcctcctacgcgagcttgagccgctagacgcgagccatcccctgcgcgggatccacgtgcgcgcctccgacctcgagcctgccgacgccgacctgcaggcgtcgctcttcgacccgcttccccgccgcaccgagatgcgcgagctcgacgcctccgtcgacgacctgcgccgtcgctacggcaacaagtgcgtcgtatggggcgcgcagctcgtcgacgaaggcgcggccagcgtcgacgccaaggccgacaacaccgtccaccccgtcagcttcttccactcgtgaggagctgctaaatgcatggaatcgagagccgcaagaagacctacgtggaggccgtggtggacatcgaccccgacggccgccagcgaccgctggcgatctactggggagacggacgatgctttgtcgtggatcgcgtgctcgaatcgaggcgcgcggcgagcatgaaggtcggcggccacgggatccgctataccgttgagatctgcggaaggacaaagcacctttggcatagcgacgacggccgatggtacgtagaggagatcgtgcccggcaacgccggggcactctagcgcaccaggtcggacacctctacctccaaggcctccgcgatgcgacacagcttgttgaacgtcacgtttatctcgcctgcctcgagcaggctgatgtaggtctggttggtgccgaccatccggcccaggcgttcttgggatagccgctgctccacccgctcgacgcggacggcattcccaagtcgcttccttcgcttgttaagctctacgtcatccattcccccattctcatttgttatatgcaatgatttattcaatatataatgtttagcactcagcaaggaaatgaaatagtcgcgaaaggagcgactcgtggacccaggatccgcaaggcctgccattaataacagcccatggccatagtcgtgaagctcgaggcgctgatgctgcagcacggcatatccctcgacaagatagcagctgcgaccgggataacgaacgtcaacgtatccaggttgaaaacggggaaggtggtcgcctacagggggactacgatcgacgccctcatcaaggcgctccgagcgctcggcgtcgaaggatgcgacgtggcagacgtgctcggcttcgtgccggacgatgagatcgcgagcatcggcgagggggtctacatcagcgtgccgaagaacctccatcacatgagcaatccttacagcgacgccgcgagggcgaagctgcgcggcgagggcggtccgaagacacaatgaaaagcgagcagtagcgggttggcgaattgaatctaagcgcaggtcatatcccagattccctcaaccggatcgtcgaggcggccgacgatctcttcgcgccgtacggagacgaggccgacgtctacgtagtggaatcgatcctgcatagggagataggcaggatggccctgcaggcgagatccggggcgatccggccgcctcgaccggagaaaggcgcgagccccgcctgcagcgctgatcgaaacgacagcgggctcctgatagaggcgatcgccgaacgctcggcgctcttgattgctgggctcgggggcgacgcggcatcgaacatcgaggccgccatccacaacgttatagccaggcgaggtgcgtcgagccgccgggcggttgggatccgttcggtcggtaagacagagggcaggcaaggattcccaaattccccttgactgccggcaccgggaggcagatcattttttcactgccgcacggcgaagccgtgccgatgcggccgatgcctttcggtcatcgggggatgccgtccgcatctgcgaggatgtgcaggagctcctcggcgtgccattgcatgtcctccggtgtttcgagcgaagggttgctgcgcgtcatctggtcgatctcggccaagaggggtacgatccttcccggtgccactcggccgagtctttgtagggatgtttgggagagctttgagacgtcgaagcaccaggttgtgccgcccgcagggcggttgtccaaggtatcgcgcagcgattccggcatcccgccctcgtggcgggcgtccgaggagccgcggagcggcgtacgcttttccacaatgcggcggcaataggacaggagagatctcacaggttgaaggattttagatgttttacgctctttaagatcggttagtgcgcaaaaaccctgatcactagcttcgttttcaagccccatggccttcgtccttttttctggtgcgcttttctccacatggttatccactttcggcgcttgcgccgcgagcgccgcatgctcgcgagcgcgctggcgctcgcggcgcttctggcgcgccgacttgctgtagtgcgcgtatccctcgtagttgtagtacacgttatggaagggcttgcgctcaactgttctctggagctctccatgccaattggacgcatagcagcacgcgatcccgaggatgtcgcgcagcttgtcccacttcacgatgtacttgttcgattgacgcgatccgtcctcggccctgccccccgtgcggacgcgcttgaggacgcccaggcgctcgagctccgcgcggatcgagtgcgccgacctcggcgatacgcgcgccgcacgcgccaggccgtcgtagctgcagtagagcacgccgctcgacgtggcgagccccacgatcgcgcggatgaccttgcggcgcgcgcccgtgaccttgtacccgccgtcctcgcgcgggacgttgttcagctcgtcgaggcgcgcgaggatctgcctgtcgccctgccgcttgcggtatcgcttgatggactcgtggtagaggtagctcgcgtaggcctggtcgagctgccattgcccgaaatcaaagaattccgcgccctgctcctcgtagtacgccttggcgtccctctgccagacgctcgccgcaacgcgcttctgcagctgccagcgggtcttgggatcgggttcttcttcggcaagcgtgccgacgtaatctatgtgctgctgtatgtcccgtatcggtcgttccatgccctggcggcacgggttcggcaactctcgaaaaccggccccgtacgccgtcgtatggggcgatatgagggctttccggggcagatttgcatataactacccaagggtggtacaatccacctctatcaaaagtctttggttttcgagttttcggaaaccgcaggggcctcgggggcgaaccggggcctcgttgttttcctaagccgtcgctccccctgccgcatcacctcctttcagcttccttttgccgcaataccgccatgttgtccaatctggacggtcggccgagatcctcgatcgacgcgcatcctggttggccacgcggttccggattgcgcagaccgggctttttgcccatggccggcgcatgccggaaaaggcagcaagcagccaccacggggtcgagagcccgtggtggctgcttgctttgaagatgaaggtagtggtgctgcggttgtgttccattgcgccttctggtcgtccggcgcggaatcgtgacggctgcgagccgatgcggttgcctgcaacgcagcaaaccgaggggttgacacacctctcccggtcagcgataatagagcaacgacaaagagctcttccaatatcacgaaaccgccgtctgcggtttctttcttttttggggttcgttcccggcgtcccgccggaatccatcacctggttcctttcctgagcgacaatgataccatacgcgccgattccgcgaatatcgcatgttgtgttttcgcgccgcaccgtcaccatacgtcgaccaccttgccgtcgctgaagtacagcatgctcgccgcgtccatcagcgtcgccttgtcggtgagcagcgcctcgacgatcctccctgccagcaccgcgccgtcgggattcccccgttgcgacaggatcgccgcgagcccgcccaagctcgacggcgcgtcagacgcgatggctgccgccacctcgcgcttcgcagcgcggtattctccggggaagagctcctcgatcatcttgagcgccctccgatcctcttccgacagcctttcctcgccggcgtcggaaagcggcgcgtcggctgcgatgcctcttctcatctttctccttcccgtgccgcgttcagctcggctgcgcggcgatcggccgcgcgcctcgagacgaacacggaaccgacgagcccgaacctgcgcagagccgacggctcgaccgtcgaggcgacgccgaggaactgcgcgccgtcgccgaagtcgatgaacctgaccggcggatccacgcatacgccgctcgagacggaaaacaagccatcggcgccgcggcatatgcagtagaccgtgtcgccaggctcgatcatcccgacatccgccctgccggcctcatcccagtaaagcccgtcgaccgtcatctcaatccctccgtcgctctcgctatctccgcctcgagctggcagtcctcggcaagctccggcaggtaccgccgcatcagcgcgcacgcgtcctccgcagacgcccctcccttgatctcggctgcagcggcgcggaagcactcgagggcgcaccccgcgtcgtagccccctttcgcgtagctggcggccagcaggttgatcaagggcttcacgacgcgcacgtacccatcccagcctgcgtccagcacgccctcgccgtccagcacctccgacggtgcgagaacctcggccgggacgggcaggggccttgcgggctcgatgcgcctcggccggtacgagcctcccctcccctcgtaggcccgatgcaccgccgaggcggccgccttgaagctcgcgatgacttccttcatcccttcctggcccaaacccccgcccgcaggggcgacgacgtcccccatgccgaagtacgcctcgaccatgccgtacgcgccggcgcagtctatctcgcccgacgacaggatgtcctcgacggcccgcctgtcgcacgagaggccgcatacgggctccgtcaccgccccgtcgccctcggtcgcctcgtacgggtagcgtcgcatgagggccatcccggaggcgcccctcacgaggacggggacggccatgtcggccctggcgacggcgcggccgtccctctcccagtcctcggccggacggcaccagccggatcccgcgccgtgggcccacgccagggcggcgttgaggggcccgtaagtcctcacccggcgcgtgccgggatcgtacgttgccgtcgccgcgatgcaggacagcaggcgggattcatcgccggcctcccggcactcctctatgacccgctcggcctctgccgtggcgtcggccaccgtcgtcggcaaggacgtcatcgcccaccgcctcccttctcggcagccccgtagcgcgccgatgcacggcacgcccttatgagctcgtccaggttcgtgctcttataggtttccatgtcgccggcgtagagcctctcgtagcgtgcgaggtcgtcgtcctcgccgcccgccgccggcattccctgatcgacgagccgttcggcgaggcgcgcgagcgcctctgacggcgtcgggcaggggcccgattccacggcggccgagccgagggcgccgtccgggagccaggacgccgcgtagccgtccccgccggccgaggcgacggcgaagcagggcgcgccccccggcgcgccgcccaggcggccgagcgacagcgggtgctccgctgcggcgcgcgatccccgcgcggccaccgagaggatgccggcgggcccgtcgaggtgccatcccctggtcgcgagatcctcggccttggccgcctcctcgccgatgcgcgcatcggacaccctcctggcgacgtcgtcgacgtcgccaggtgacgtcgcccccgctatcctcagccgcttggctacggcgaggccggtcgcctgctccacgacggtgagcacggccccttccgcccgctcgaccgtgccccagggcgcggcgtacgcgcacgcgcccgacagctcgacgaccgcctcgtaacccgggcggcactcgcacacgtaggacgagcccgctcgcgaccacgccgtcatctccccgcccccctggacggggcggcggcgcgggcggccccttcggccccgctcgccagcatgtgcctggcagggcaccggagccccttctccgcggccgatgcggccgtgcgcgtggcgatgtcggacgcgatgctccaggcggccctcgccgacggcatgctcgcgcccagtatggccctcgagacgtccttccccacggccacgaagtccccgccggcgtcgatggacgccagcgcagcgtcgcggacgtttcgcacgagcccgtagaacccgatgccgttgggctggccctcgctggcgtcccggtcggccgccagcgacttgaccagggctagcggccgcccgccgcgcagcgcgacggatccggccagctctacgagctggcattggtccgacgaggacagcccgtccgagcacttggcgatgagctcgacggcctcgcgcaccgctcccctgacgtcctccgccccgtaggcggcctcccccgcctcgacggccttcgccatcccgtcccatctcaagcccttgtcctccgcgccgacccccatgacgggcgtggcgaagtaggacgccgtctccatggcggaagcgtcgagcccctcgtaggcgtagaccgagacgtcccagcccctgtctatccccctgttaaccatgatcagctccgcccggtcgaacagcacgagcccggagtcctcgagcgagagctggtcgcctcctatctcgctcgcctccgccacggcggccagggagggatcgtgtcccttctcgccgatcttggcgtccagctcggcgaggcgctgctttacctccagcaggcgccgctgctgcgggaagggcttcccgacgccctccctcgcggcggcaagctccgcctgggcccgctcgagcctttcggccgcggacgcggcgtagcgctccatgttcctcgcctctcgctcgatcctcgtgaccgccccgatcccgctgtccgccccctcgaaggtcatggcaggcgcgtgtccgacgccgacgcggaagcagcccgtgcccgcctggaacgtcgccgtcacgtccagccccatgatcgagccgaccacctgggcctcgccgtacgactctgcgcatgccacgagcgcagccctcagcgcatcggccgcgtccgtcctcttctcgcagtacgcccccatcacggtcatgccggggaagccgccctcggggcccttgcgcgccttcaccgtggcggcgtcgcccccgagcctctcgatcgcctcctcggccgaggctatcttcgcggggcacacctcgtcgcgcagccgccggagctccgcctggtccctcctgtgggcccgctcaaggctggccaggcggggcagctcgttctgcaactctaggcgctctttcacgtccgggtccccggcgcagagcgccttgacctccgcgtaggagagcgccgcctggtcgatgtcatcggcgctgcgggatgctgcgccggatccgccgaacacctggcctatgaaccgctgcttgtgctcgacggtctggtacatgtagctgtcgaacgtccccttcgtgacgtaccggtagatgccgacctccttgttccggttgccctggcgcagtatgcgcccctcccgctgctcgaggtcggacggccgccacgggcagtcgaggtggtggagggccacgagcctcgtctggacgttagtcccctcgcccagcttctgggtgctgcccatgagcaccctcacctcgccggagcgcgcggcctcgaagagacgggccttggccttttccgtcttggcgtcgtgaacataggctatctcccccgcgggtatgcccatgtcgaccagcttgccccgcaggtcgtcgtacacgttgaagccctcgggcttcggggtgctcaggtcgcagaacacgatctggacgccgcgcgccggttcgctgtccctccatatgccccagatcttctgcgcggccgcggaggtcttcgaccagtccccgtccggcaggtcggggatcacgagcctctggtcgagggcgagctttcgaccgtcgttggtcacgacgagcatgttgtcgctcgccgggtcgacggatcccgacctgatcgcgtcggcccgcctgccgagctccgccaccatgcgcacctgctcaggcgacggctccagcgccacgttctcgcgccgcgcctccgggatgcccggcagcgctatgtcggcggcggtcttgacgtcgcaaacggaggcgaacatcgtgatgagctcgggcaagttggtgaacgacgagaacctggtctttacctggaagccggagccctccggcttgagctcgagcgaggtggtcttccgagcgaacatcgacgcccatgcgtcgaagccgttcagcccggcgagcgcgagcgtctgcggctgcaggtagcgctgcatgttgtagacctcggtcatgctgttggacacggccgtccccgtcgcgaacacgacccccttgtagcccgtccgctcgttgatccagcgcgtcttgtagagcatgtcggacgcgcgctggctgtcgccggcctgcaggccggccacgtttcgcatcttcgtctccgtgaacaggttcttatagtggtgggcctcgtcgacgaagatgcggtcgatgcccaggtcggtgaagtcgagcatgtcgtcctggtcgtgcttacgcgtcttctcgagacgcgtctcgaggcgcttccggcgcccctcgagctgcttgacggtgagcctcttcgcggcgtcgtcagacatcctcgcctggtcgatggcgtcctcgatcctgatcttttcctcctcgatgtagcgggcctccagctcgggcggcaacgggatcttggcgagctgcgtctcggacacgatgaccgcgtcccagtcgcccgccgcgatgcgcgccacgaagcgcttgcggttgtccttctcgaagtcggcgtcggtggccacgaggatcgacgcctgcgggtagagccgcatgaactcgatgccccactgccctaccaggtgcttcggcacagagaacagcggctttgaggcaagccccatcctcttgagctcctgggatgcggcggccatggtgtaggtcttgcccgcgccgacgcagtaccagagcagggagttcccgccgaacacgatcctcgcggccccgtccttctggtgcttcgccagctctatgtcggccgccatcccctcgaacgacagcagcgagccgtcgaactgcctcggcacaagggagttgaagcggcggttgtactcggcgaccagggccgctcgtcgcgcgccgtcctcccatacccagtcacggaacctcgaggcgatggcgtcctgcttcgactgggcggcgatggtggcctccctgtcgacgacggacacggtcttccgcgcggccgggtcgtacatcgtcctgttgaccaccgcgtcgcgcaggttaagggacgcctccatgaggtcgagggcgttgcgcgcgcgggtgccgtacacccggtcgaccttggcgccgtacaccttgcccttgttcgatatgcgccactgggacagctcgggcgagtacgcgaccgagatctggtcgcgggagccctccaccctgtggctcctgggcagctggaacacctcgtaggcgaactgctcgtacaccgccgccggtacccacgtcgcccccagctcgagggagatctcctcggccgggacgtcgggcggcagggccgactcgagcgccttgacgttcgcctccatgtcctcgtccccccggtagagcctcgcctcgtcgagcttgacccggacgttgcccgaaaggtactcctccgccgtcaccaaggccgacagggccgggtcgtagtacacgcggccggagaggccggcgcggatggcctcgggcgcgagcccggatacggactccatgtagcccatgtcgacgcggccgaccgcgttgagggacatggcgagcgcctcggcggcgtcggccgccgtgcgccgcttcggcaccgggcggacggtgcgccgatcgaacagggcggccggctcccactccccgtcgacgggatcctcccacgacgacagcagcggcgcgtaggcgtcgccccgcatcgcaatgacattgggcttgtcgttgagccggccgtgcttctccacgagccgctcgtaggccgccttgaaggccgtgcgcgccgactcgatgggctcgtcgtcggccccggccgactgcagggccaggtactccctgccaagatccctcagccccgccaaggcgcggatccgcgcttcctgcgatttgggcccgccgtagaggcgcatggtgtcgccctcgcggtaccacagcgcgccgtcgacgacgccgtagcagccgtccggcacggacgggtcggcctcgatcaagtcggcggcggccgcgccgccgcgcgcggcgggcagcgggcgctcctcgtaggaaccggacgcgagttccatgagcctccccgcgagggaggcggccgcctcggcccagtcgcccttgcaggcgagctgcgggccgtaggggccggacacgacctcgagctcgccgagcacggcctcccggtgctccgcgatccagcggttcacccgcacgccgtccgaatgctccaccgtaccgacccatgggaggccggcggcctcctcattggagatcctctcgtgcctcttcctcagcacgacgacgtcgctcgtcacggtcgtccccgccgacgccctgaacgtgctgtcgggcagcctcgccgcgcagaccagctcggccctggccgccagctcgcgcctcgcggagctcgacttcttatcgagcgttcccgaggcggtgatgaacgcgacgaggccgccggggcgcacgtggtcgagcgacttggcgaagaagtaatcgtggacgagcatcccctcgccggcatggcggcggtcgtagaccgagaactggccgaaggggacgttggtgacggcgacgtcgaacgagtcgtcggccagcgtcgtcgcctcgtagcccttgcactggacggccatgccggggtgcgcgtgctgcgctatcagggcggacaccgggtcgggctccaccatggtgatgctggcgaggccggccatgccctccggcatcgcgtcggcgaaccggcccgtcccggcggccgggtcgagcacgttgccggcggagaacccggccatggcgaggtagtcccacaccgcgcgggccacctcgatcggggtgtagtaagcggtgagcgtggactcgcgcgccttggcgtactccctctccgtgaggccggccttgagcctctcgcgctcggccgcgtaggcgtccgacgtctcgtcgaacacctcggcgaggccgccccacccgacgaacgagagcatcctggccgcctcctcgggcgtcgcctcgcggccctcgcgctcgagctccttcgcgaccatgaccgcttcgatgttccgcgcgatcctcgtgcgggaaggagccggcgaggcgtccccgatgggacggcgggacggctccgtggccgccgtgcccttctccggcgatgcggcgtgcgccgcccgctcgggcgagggggccggcgacgccggctcgaacacgggggcggcgtccgacggctcgaacagcaggtcgagcgacatctggccctccatcaccttcctgccgcgcctggagggccggcgccgcgccgctacaggcttatcgctatgtccggtatctccgagatcatggcctcgttctccgccgccgcggcggcgttcatcagcgccgccttctgctgcgcgtcttttgcctgggagctctgcggggaccgcatccacgcctgcgcggcggccgtcctgcgcgactccgccagcaggtgaaccatggccatctccctgccgacctgctcctcgctcttgccctccagcgtctccggcgcgtgctgcaggcgccagtcgcgcatcgccaccgccacgggatccttcgcccagccttcgaggcctagctgccactccaggtgctccttctccaggcccgcctccctggcgtcccgctccagctccctgtaaagctcgtcgtagttcatcatctccggtcctctctgccaagccgtgctcgacggccatctccgcaaccttgcccgcgtcgccgcggcccaccgtctcgtaccgccccgccgtggccctctcgacaagggccaggacgtccgcgtcgatcctctcggcctcgtcctcggcgtgtatccgggcgcgggggtcgtacgccccctccctggcgacgatcacgttgaccgactcctgtgcctcgaactcgtcctgcgcgagggccgccagcctcgccgccctgtcctcgtcggcgtcgggggcgaggtaggcgaggcccatgatggccggcgagtccgccacgacgaactgcacgagcccgtcgagccggcgctcgcgcgccgactgccggcggtacagctcctcctggctctccacgctgccgtccagcaggcgcgccgcctcctggtcgccgcgcgcagcgtcgtagatgcagtccttgaccacctcgccgacgcactcggccgtgtagccgcgcgccttgagctccgccgcgacggcgtacgccatcgtcgacttgccggagccgggcccgccgaacacgttcacgtgcacggatcccgttgcgccgccctgcgcgctcatcgctcgatccttattccgttgtgaatccgggatttcggtcccgtgtcgcttctcgccgcccgcgcgccgcctggatttgggagatggctcgcgctcgggcacggtgccattatctcacctatcgatgcctttgtgtagtgctcggccatgtctttctcccttttttcaaaaactcgactattcaagttttccagttttccaataccttggttctcaagccgccatcaacgcgaccgtgagcgccgtcaacgcgaccgccgccgcggtcgtcatccatgcgacgaaggcccagccgacggccatccccgcggcggcgaggctccccttggccgccctgcggcgcagcggcgtcccgtccgcggccttccagcgcgaggccgcgatggcggccacgtccgcgagcgcgccgagcccgagcaggcctcccgtcagcagccatacgattgccgtagcgatcttgcccgtatagaacctgtgcgccccggtgaaccccaggacgctggcgagcgcgagcgcgacgtgccagctctgcgagttcggctcttcggactcctcttcccgcagcggccgctgctccaacgggtacgggcagaacagcttcgacccgtcggccaatgtgacccactcgcccatatccgcctccgatctagtacaccaacgagatggttccgaaagccccgcccataagcgccatgacgccgcccgacacggcggcctgcaggcccttcttcgcggccactgcgtcgtccgagtggaagaagtagtcgtagaagccgttgatcatccaaagggtgccgagcgcgatcaggcccggaacggcgaactcgcgcatgaagccgttcaggctcccacggccgaggtcgtaggccgtgaaggcgaccatgacccctcccgtcgcgagcatgccgagcgcctggcgcgccgcgggcccgtcgtccgagcggttctggaagtaccggtacgccccgaatgcggtgaggacgtacccggcgagctgcacgatgggcttgagcacctcgctcacgagcctgtcgagagtcatgccgtcctgccccagcgccgcaccgtacccccatgcccaagcctgggaggcgtcggcaagggagagcgccgcggcgagcgcgacgacggcggctgtcttcgatccatgcctcatgtcacatcatcttcccgacgaccttgtacgtcgtcatcgtcgaaccgagcacgaccaccagcagcgtcgccgtgtagatgagccctccccggatgatctgccagatgtcgccgcccgacgtcacgatcaccccttcgaggatcatgggcgtgatgatgacgaccgcctggacgaccgcgatcatgatggccgcgctgccgatctctttgaagtacatcctgccggcctcggcccactcctcgctgagaaggaacgccacgggaatgctacagaatcccgtgagcacgctcgcctcggcggacctggccaggatcacggcctcgcccgcgaaggacacgatcatcgacatcacccagaagaagagagcgccgaggtagagcaggagcaggctgccgatgtaggagccgagcgcccctgctatgccggcgttgccggaggcgtcgccggcggtctgcccgagagcggagttgacggccgcggacagcgccgcctggtcgaaggacacgccggccgacccgcccggggcgtactgggagatggcgttcgatatgccgtcgccggcgaggagtatcccgtatatgagcagcggcgcgaggtcgatcagcgttttgtacaagaagaacttgaccagcatcatcacgagctcgtaaagcccctccccatggatgaagctgccgtcggtcgccgtgaccttcttgaacaccccttggaaaaggaacaccatgatgagcgactcgcccaccggcgcggccgccttgttgatgacggcgatgacgtcggcgacgcgcgaggcgtccacgtcgaacttgtaggacgcgagctgcgacagccaggtgtcggacgccgactgcattatcgccgccacgccgtcgccgaggccgagggcggtgaagaagttgttgactatgccggagatcgacaggccggtcagatcctcgatccacccgccgtaggccgtatccgcgaggatcatcatagcgagcatcgcgatcaggacgcatgctcccgccaaactcgtgcggaagaccacgcgcctccaccgggctgcacgatctacggttgcggacagatggctgatgacgggatcgggagcgacggcaccctcgtacgccggcgcgcgcctcataaagcatcgcccccgcgctcgatgcgctcgggcttctcagaccctccggtcaaagactccaaggggacgaccgtgcacgtgccgtagtccagggagtaggcgacgcctacgtcggccgctttcgagccgtcggaatccagcagctccacctccaggtaggacgaggcggtcgacgacgggaagctgagcacggccgaaacgtacgcgcgagacgcctcgatgcccttctccttgcagtacgccccgagcgcggcgcgcaccgcatcctggtcgacccgcgttgcctcggcctgatcgggggcgatgtccaaggacaaggcgggctcctcgccgtccgcatcggcgccggcctgccccgctcccccccggtcgtccggcgcggattgctggacggcgggcgcggcgtccctcttggaaggggacgggccgacgcatgagaactcgttgacggcgacgttgacggcgacggccagggcgaggagggtgatcgccgtgcgcatggcccgcttccgccggcgctcgatctcgtccatctcctcggccgtgtcggggttcgccctccataggttgtcgtgcttcatcttcactataagtaccgcctaacctgccagttgtaagtgttcgccacatagctcgatacatcccccgagtaatgggggccgggcgcgtggcccatgcccatcagctgcccgtctcccacgtacatctcgacgtgatcccatgtcgggttgtacccgttaaagttgcagaacacgaggtcgcccggctcgagctgggaggcggagacgccctgccctctcgaccccgaggctatctccttgcctccgagcgactggtcgccggtgtaccagcctatgtccatgccggtgacggctaggtaggccgccctgcacatgcccgagcagtcggtggcgcccgtcctgtcgggatccacgcgcaggctcgcatcctgggagtacaccagccacttgttctcgcgcgccttgacccattcggccacggccgccccgtcgcccgacgctccgtaggacacctcgtaatgctccagcacgcgcaaggggtagttgggcgtgccgataccgtagcttcgcgccagatcctcgctccacctgccgccgttggacagcgcgtaggcatgccagccagggcccgagttgtacgtctgcagcacgttcttcaacgcctcgaggtcgcaagggtcgtcgcatccccagagccgcagcttgtcggacaggtacgcgcagccctgcttgacgctggccgagcaccaccagtcgtcgccgtccgcacccgtcacggggtcggcgacagtgccggcatcggggaatcccgggcgggacgcccccgtcgactcggcgcactggaacgggtcgtggtcggctatcttccagccggcaccgccgctctcatgctggcagaccgccagcgcgagctcgacgaactcccccttgccctcctggtgcatgtagtaggacacgtagggcctcagcgcctgcacctcctccgacaggccgacggccctcgcctgggtcgaggacgcgccagcgccgcacatgcagaggacgagcccgcagagcgcgagcgccgcgagcatggccattgcgagcgcgaccgtcggcgcgccgacggcggccgcggccgcggccagccccttgccggccccgaccgcggcggccttgccggcgttcgccgccgccgcgcgcccgacgccggctgcggccttgcccgccgcagctcccgacgacgcagcgccggacgccgtggccggcgctgcggagcgcgcggcggcggccgtagacccggcgccgcggacgcccgcagctcccgggccgccgggcgcgcggccggccgggcgcgcgggatcgccgggcagcccggcgcggcccgcgggcccggccgggccctgtcccgatcctgcccggcccggcctcctcgcggccctgcgcgcgacggtggaagcgcctccgaccaacatgtcggatccggcctccgacgacgtgtcgcggccgtcgtccacggtgctctccaagtagccccacgccgtcccggcgatcccgagcgcggcgggggccgcagccctcccggatgcggtccccgcgctcccaggggacggggacccggcggcgggcgagggcgcgcccgcagactcgaagcccgccggcgcgggtacggccggacgcggcgcggcgctgcccgtgtcccctgccgcgccaaggctcgccgggacggcggacgcctgcgcgccggccccttgcagcgcgccggcggccctcgccgccgcgccgggaggggcgggggacagcctggagtcgaacatcgtgccggccggcgcggccgggccggccgcgaagctgatgcccgatgtctcgagcgccgccgcatcggcgctgcgcgcgttgctctgcggcgcgtcgcccgcaaacgtcgcggagtcctccggcctggcgtcgtcctgccaggcggcgatgacgtcctcgctatgtccgatgttgacgtacatggcctacatcgctcgccctttggtttccttgggtttggaagtgaacaccttgtacgtctcggtgcccttgggccaagagtctttgaacggcatgaccgaccccatgaccgacaagacgccgtggccctcgggcgggttgaccgtgtagcgcatctgccgctcggacatgtgaagccgctcggcgagctccctcgcgtcgtcgtgggccatgttgtacatggtgacgacgccggagttgtccagggcgcgggacgccttggcgttctcgagcactgccaagacgttctgggtggcgcccgtctggtacaggtcgtacttgcggccttccatccacgccttcaagaaatattgcgcggcgatcggccagtccatgaaggtctggaactcgtcgaacagcacccacgtttcatagcccttcaccttgttcattacggcttgcctccagaacatgtccgtgaaggcgaacaatgcgggggccttgatgatgtcgccggcgttgcggaacccgacgccgaacagcctgcaatcatcgtcgtcgaagggagatccgtcgcgctggctgaactgaccgccgactgccgtagtggtcgtgaagaggctgagcgcctgggcggcgtcgcgcgcgacggggactttcatgtcgcccagctcatcggcgagctgcgcgagcacggggacgtcctcggcccggtgcgtgtcgaggtagcggccgtagaccttcggtatgcaatcctggatgcaagaatagagcagcgtcgcctccttcgcagcccgtgtgtccttgccgtccatgaccgcgcccttgtagagcatgcactccacctggcccatgaggtactccgccttgtccgcgatggcctgctctacgtcctccacctggtcgatgttgatggacatgacattgaagtagtccttcgagccggcgccgacctcgaaccatttaccgccgaggagctgaacgaacggcttgtatgcgagcccgggggacgcgatgtagaccttcgcacgggggcgtcgaagcaggatctgcaggttctcccggcacaggccgaacgacttgcccgagcccgtgatcccgaacaccatctggtgcggcgcgccgagcgccgtccggtcgagcatgatgaagtcctccgactccgcgtcgaccccccagtagataccgcccggatcctggtagcggcgcgacgtgaacgggatgagcgcgccgacgttggcggtcgtcatcgtggacggggcgttgatgaagttcttgcctatgggaagggtcgcgttcatggcgtccttctgccgctcgcgccccgacagcggcgtcgcgctcacgccccacctcccgcaggcccgctgcagcttgggtatctgctcgagcttgaggtcgtcgggcgtctcggcgcgcacatgcgcgctcatggtcgtgtagaagagcttgtggcctccgaactgcacctctttcttgagctcctccgcgtcctgggcgcggtcgacgtgcttggaggtcatgtagacgcccgccggcatgttctcgcgacgcgcctccttggcacggtcgtgcgtgtcgccctcgacggcggcgatgtaggcgtcggtcgccttgcgcgagctctcggccgacgtgggctgcatgtggatggtgaacatcatgtccatgggcgtcgaggtgatgacgctcaccatcctgtcgtctatcatgccgggcgacttgcgcagcagcagcgtcgaggcgtagaaatcgttgcagcggtagatcccgctgtccttgacgaccgaggtggtgccgttcgggcgcggcttgaggatgcgcggctcgaacgcgagggacatcggggccacggcgtccttggtggtgagccccgtggccttgccggtcttggtgtcgacgagcgttgcccagtcgaacacgaggacgtcggagggccagaacacgccggccactatctcgagccattccgcgccgctcagcaccgtcaggccggatcccatcgactcgaagtcggggcgtatgtccttgaccaggccgtcgaggatgctctgggcctcggcctcgttgtcggccttggtgcagatcgtgagcagcaggcgcgtctctatgtccgtcttgcccttcgacgcgcggtcggtgagcacctcgttgacctcgtcgcgcaggcggtcgagcccgtccggctggtgggatatgagcacctcgtcgaggatcgaccggcggccgacgacgcgcacgatgaccgaccactgcaggtgcgtcgtcggctcgaacaggttgtagacccgcaggagccggacgtacagcgcctccttctcgctctcgccgaggttgcggtagtccatgttgtccacgtcgcatgttatcgagtagagccctttctcgaccttcacgacgccgctctcgaagcacttctcgtagcggatcgcatcctgggtgatcttcgacaggggcttgcccttcgccttgcgccgctcgtactcgcggcgctctcgctcccggttgcgcgcctcggcgagcgccatctcggcctgcttcaccgtcaggcccgcgacgtccggcatggcagcatccgccctatcgtgcgcttcgcgctttgccgcggacgtactctcgctctttcttctcatgcttggcagactccttcctctccctgggcgacttcgccggcggatcttccatcacctcgtactcgtcctcgtcgtcgcagccgtacacgtatacgtcctccccgctcaacgcggatgcgagccgctccctcatgtactcctccggcgactcgtagccgggcggggccttggtgttggccacgtaaaagaaggggaacgccaccgcgatggcgggcatcacgcggaagagctcgggcacgctcaaaggggcgaaccagagcgcgccgccgacaactgcggcgaggacgatgccgatgccgccgtacttgagctcgcgagacgtgaaaggcccgaatgccttccgctcgtagtcgagcgggtcgaggtggtaggggacggtgaaggacattgcggcctcagctcatggagagcatgaggacggcgccgccgcctatggccgccatgatgccgccgccaaccatcccggccaagcccgccttggccttcggcccctcctcgtccttgtagttgaagtagttgtaaccccctaccaccaagatcgcgaagcccatgaccgtcatgccgggccccacgtattgggtgatcatgtagttgaagcttggcccgttgacgtccacggcgtaagcgggcctcgcgctcgcgaggcacacggcgccggccccgaagagcgacagcgccgccgccttcgccttcccaagcgcagatgccctgttcttggccgttttcgatgtttggtctttcatgtcccgttcctttcgaatatcatttccttggtcaaagccgcctcgttgcggccgtgatcgcttctcggccccggaccgtgggagacggaccggggcctttccatgtcgtcaagcggcaagggatgccc

SEQ ID NO: 52 - DNA, 22618 bp, Eggerthella lenta
  source 1..22618: mol_type = genomic DNA
cctcgatgccgtgcaggcggccgtgctgctcgtgaagctgggcgtgttcgaggggcgcgaactcgacgccgtgaacgaggcggccgcgctctatgacgagatgctcgccggaagcggcctcgttctgccggagatcccggaggggtatcgtagctcgtgggcccagtacaccgtgcagctgcccggggacgccgaccgcgatgccttgcagatcgcgctcaaagaacggggcatccccactatggtgtattaccccaagcccatgcacgagcagagggcgttcgagggcgcgcatctgcgccccggcggatgccccgtggcgaagcggttgtgcgagacggttctgagcctgccgatggggccgtacctcgatatctcatctcaagcctgtgtaaccgattctcttgcacaggcccgactgacctttggctcagatgaaagatagtcgttcaaaaagcgatacttccttcggcagcttgctgctgactgctttctttttaagcaatttcttctttcggtcctttccgatcgatgcattttacataaatgcgctcgttgggactgtgggcatctcagcgcttctttacacgttcgcaactgagaaaaacagcagctatcccgtgtctattatcctgtatggcttgatcgcatcgttggtcatgatgctgtcattcttctacaatggtaattcgggaatagaagactttgcatggatatgggtatatgcaggaccggcgtcgattttactaacgaagcgaatcgattatcgctggttcaaagctgctttctatcttgtagcaacgttcattgctatttgcgttattctcggggtaagtgaaaatggaattttcaccaccaccaataggaattacatttcggctacagctattcttctcgtatgtctcttctacctatttcaatttcgtcaaactggaaggatcactctcgtaccagcagctatttgcgtaggcgtatgcctgtatggttcgggcaggtcgggcataatcctcggtgctgcgctttttgttggcatccttctgttttatctattttacgaaaagagactgacttttcgtaaaactatgactgttattgttgtactagctatagcgtttttgattatctggtacttcttgggagatacccttcagtatctgatctatcgttttgatcgcgagggattacagagccctcgcatgaccatatgggcagaatactggagagctatatcgcactcacttggagacttccttatgggagcccccacaacgtcttcaacgggattcaccattgcgcgatataaaggaaaccttcacaacgcttttttcatgttacatgctcgttttggtctgatcggtataattcttatcacgattggcatgatttatgcaattgcgaggctaataggtcaacgagattacctcggcgtcttcttgctttcggttcttgccgtgcgggcatcgtttgattggcttgcatttcccggcccttatgatccagtgtttctgtttttcatattttctggatcaagagggttttgctcggtaaaccgtaaagaaatccttgttgcgtcggaaacaagcccatttacgaagcattctacatgttagatttcaagaacacgacactacgatcattcgcaaaacgtgctttagcggattactcgctcaccttcttgtcttcggtggctactattggcgttattcaaattttcgtctacccatatgtcgcgcgggtgctagacaatcaagcttatggactgttcttgacgcttatgggtgttgcgaactccttaatgccggcttttggcagcacgcttaggaatacccgaatcgtcatgaacgaagagtacgcaatacgaaactgtccgaaaagcgacttcaagcgcatcgcgtgcttcgttgcaccatcggtagccgttctttcaaccaccgcgatgtcaatggtgtaccacatggatgctttcaatgctctgattatggcagcgttgctagcatgcggaatattgaaagcgtacggattgttcgtcttccgcttaccgatagatccacggaaaaacctcaaagcgagtctagcttcttgcgtaggatacctcgctggcttgcccctcgtagcctttgcagactggtggttctttccgttccttctcgcggaagcattgagtttggcgtatgttttaaaagagtctccgattttcgagggcagcataagcgcatcatcgttatacccgagcgctttgaagatgtactcctacctcacgataacgaacctcatcacttactgctccgtttacattgaccgcatcttgctttaccccttgctcgggcccatcgctgttacaacctattatgccgcttcgttcgttggtaaagcttgcacgtttttgatgagtccactaagcacggttctactaagctatataagcgacggatcgcattgcctgacggtcaagcgatatgacttgttgaatgggtcgatactcctaggtgcgtgcatcgtcggtgctcttttacttgctgcagcgccgctgatcacgacgattttgtaccccgatcttgtcagcgatgcaatgccctttatttatattggaaatgccgcctcgctgctcggtgttgttaacggcgtaaatatggtgatcgtgctcaaagcagctcctgctcaatggcagcttatcatatccatcgcgaagcttgcgctctatgtcatggcagctctttttgccggatcagctggcaacttgaccgtattgtgcgttgcgctactgttttcgaacatagcaatttatcttatgacgtattttgtgggcagattctacctgcttacgacaacttcgagaaaaactccgaaaggataggtatgagcattcacggctcccttagaagtatctttcgcatttgcggtagagcatgttacaagatgttgcccttggagtggtttttgcgcctgaaatttagagtgctcatgggacgttcgctcaatttagacaatcccagcacgttttcggaaaaaatctattgtttaaaagttcttaatggagaattgcgtgcgccccttattcagcgctgttatgacaaagtcaatgttcgagattacgtagtcgaaaaactgggacaaaagcggggggaagctattctaaacgagctgtatggcgtgtatgaccggccagaggatattgatttcaatcaactgcccaacgccttcgctctcaaagtgactcaaagcagcggcttcaacgtgctttgcctcgacaagaatcggctggataaatccgaggtggttcagaagctaaaagattggcagaggatttcgaacatgatgggagatttttcggaggaaggttatatttatgacggacatgcgcgaatatgctgcgagcgatatttgcgtcaagaggacggaagcgtgccgcccgacatacgtatctattgctttcacggcgtgcccagattgttcgtttgcgacttcggaacaacaaacgacgatggttctcacggaactcatatagtgaggaacgtctacgacgagtcgtggaacctgctcgaagttgatctcggtcgtcctcacgatccatctgttgtaatggagaagccggataacctggatgaactcattttcgtagctcggaagctttccgaagactttcctttcgttcgagtcgatttgtacaatttgaatgaaagtatcatctttggagaattgacttggatacccatggggggaaactgcatcatttcccctttatcgttcgatcgcgaaatgggctcttggctagatattcccaattggcatgacccaatcgaaaccaagcgtcaagtgcaggagcctacccgatgaacagcccattaatttcgaggctcgtgaaattcaaacagaaagtgatgcgggtattgctgggggctaacagggacgagtcgctttcattgagcgagcagattcaagtcatcgaagccttaccggaaccgcccgatttaatagagcgttcgtactatcaatatctttgtcaaaaaaagcgccattcggctttagcttatcggatctttgtaacgggcgctaatattattgcgatcatcccattgctttactactcatttctgaagcgttcgacaaacgagcctgctaatcaatcagaatcgagcactgccgtttttctaggcgttccggccgttaaagaccgcataccggaaagtttgatcaaggaatacggaaagctgatcatcgagggggaatttggcttatcggtaacacgattcgaaaagaactttatacgacgaatttgggcgcgccaccctttaaatgtcttgttcgtgctgaaatgcgctatgaagattgcagcttaccgagatgtcatcgacagcgttggcgctaacgcaataatcgcaacaagcgaagactcctacacttcttccgtgcttacggagtattgcagaaggcggcacgtgaagcatattaacatgatgcatggggaagtcgtatacaacctttctcgaactttctttgcatttgatgcttgctacgtctgggatcagcattactcaaatcttatgacgagattgagagcagagccaactcaattcattatcgagcttcccaaaggcttaatctaccaagaggcatcgagcgttcgtgcgaatggagcgacgtactatttgcagaatcaggatattcggcaaatgcttcaaatcaaagagctcctcgaaagccttcagatagattatcgagtaagaccacatcatatctggacagagatggatgagcttcgtcgggtcttcgaagcgtcgcacatcgaagatgcacatgatgtccccatcgaagaatcgattttgaaaagtgaagttcttatttcatggtgttcaaccgttctatttcaaggatatgtcaatgaaaaaagaaccgttgtggacaacgtatcgaaccccgtcctcattgagcgcatgaaagattcagattacatcatgctagctgaaggaagatcagaattactcagcaatgtattgcatgagctcggaacgatcgtatgacttcaactcttcagtggatgactgaatctacaatgcgtaggttttgatcatgtttgcgatgttttcagcatcgcaaactagcgctggtagctcaatacgagtccgaaaggcctctctcgtcaaatacatacatgccattttgagactccactcctaaatagcactttcgtttccaatattgtttgagggggttaattgattacatccaaaagggaattaagacagtatttagaagctgatcagaaggcattgaaagccttccataaacatccgttagcaagctccgacaattcgatgatttggctaacggatccggtatacaaatgggagcgtctcctcaggttcactgagtatctcgaaaactgcagacgcgaggctgccttcttaccaatacgcatattctttcgatggcggttcgccaaagaaagcacgcgcctaggtttctccatccctctgaacacttgcggaccgggactggctattctgcattttgggagcgttgtagtaagtaggcatgctagccttggcgcgaattgtgttcttaatagtgctgtaaatattggagcaaatccgttacggggtggtgcaccgcaaattggaaacgacgtttatataggacccggtgcaaaactctacaacgagattgctatcgccgatggctgcatgatcggggccaatgcagttgtgtgccatagctgttgcgtcccaggatcgcttctagttggaataccagcaaaaccaaaatatcaattaaagaaaggaagtgcaaaatgcgaatagcaggcaggagagtaggggcagatgcgccggtcttcataatcgcggaagcatgtgataatcacatgggtagtctcgacgctgccaaggaaatgtgccttcaagcaaaactagcaggctgcgattgtatcaagtttcagcaccatcttcccgacgaggagatgctgcccaatgtgcccatgtcgtcaaacttcgacattcctctttatgaatttctcaaacgctacgctctaacactcgaccagcatgaagagcttctaaaacactgcgatgagatcggtattatgtacctctgtaccccgttcagccttaaagcggcttatgagctagacgaactcggagtccccgctttcaagatcggttcgggcgagatggacgacatccctaccttgagggcgattgcaaaactcgagaagcccatgatagtttcaacaggcatggcaacttttgaggaaatcgaaagaacatatgccgctttaagctcatcgggcatatctttcgccttgatgaactgcctttctgaatatcccccacgttatgaagatgtgaacctgggcgttatcgtccaaatgagagattcctttccaaatgcaattattggacattccgatcatacgccggatctttttacgacattcgcatcggttgctctcggcgcaaaaataatcgagaagcacgttatcctcgacaagcggacccctgggccggatcaagcggtttccattgatttcttcgagatgagagagctggtagatggggtgcgtaaggttgaagctgctttgggaagccaaaagaaagtgcatcaggccgaacagggaatacgggagtgggcccatcgaagcatcgtctcgcttgttgatattcccgcagggacgataatttcgcaagacatggtttggtcaaagcggcccggaactggcattccgtcatatcgcatggaagaggttataggacaagtggtcacacgtgacatccgggcaaacacacttatagcctggaatgacctggctcaggagagcttatgaaaaagctgttgttcctaacaggatctcgcggcgaatgggggtatatacgtccgatactgaggcttgcgcagatgcgtgatgacgtagaaactgccctcgttgtaacaaacatgcaccttctcccgggatacggaaattcctatcgagaaatcgaaaatgacggttttcgcatcgatcacaaaatcaggatggcgatcgaggggggcgatcatgtctctcacgcaaaatctcttggtatctgccttcaagcgctgcccgatgtgcttgatgttgaaaaccctgattgggttgttcttgcaggcgatcgaggcgaacagttgatgggagcaatcgccgcctcttacatgtatgtgccggttgctcacatacaggcaggagaggtttcgggcaatatcgacggaatgacgcgccatgctattgggaagcttgctcacctgcatcttgccgcaaacgaggatgctgcctgtcggcttatcaagttaggggaagagccttttcgtgtccacaatgtcggtgctccacaggttgatgagatggttgaagcaaaatactcatcaaagattgatatcgagacgcgtctaggcttaaacctggaacgagggtttatgcttgcagttatgcaccccgtcactgaagaagcagcaaaggctggtgaacaggcgaagatatttgtagaagcgctcaacgaattcgaaatgccaaagatcgttatccttcccaacaacgatgccggttcgttcagcgttcgcaacgccattgtctctcatcgaaacggagactatcatctctttgcgaacttgaaacgtgaagattacctaggtttgctcaaagaggcaagatgcatcgttggaaattcaagttcggggcttttagaggcgccaactttcaaaacggcagccgtgaacattggccgtaggcaagacatgagattcagaggaagcaatgtcattgatgtcgatttcgataaagaagcaatcgttgaagcgatcaggaaagctacttcaaaagagttcgaagaggctttgaaaacgtgtgaaaatccttacggagatgggaaatcatcacagagaattctcgatctgcttgtctctacggagatcaatgactctttaatgactaaaacactcacttattagaaagagtgacgccatggatagcagtcttgcggtttattgcgtaaccccgacttacacaattcgggaagcgctaaatcagatcgaggaaaacaggagcaggggtgttttcgtcatcggaaatggcgatcgtgttgaaggattccttagccaaggagacatcatacgcgcattgtgcgtgggtgctgacatttattcgtctatccgacatttttcatctccgtcctttctatatctgaaagatcgcgatatggataaggctttcgggcttctcaaagaaagaggaatgaccttgtttcctgttgttgatgacgactttaagctgattgatgttataacgcttttcgacgtcatggaatatattgacaggaggttgtcaaatggataagagacggctaccgtgtcttgcggtgataccagctcgtggcggttctaaaggtattcccttgaagaacatccagccgatcggcggcaaacctttgctggtttgggcgatagaagcactgaagcgatccgacattgatgcagatatagcgataagcacagattcagaagagatcattgcagtagcacgacgttattgcaatgaaagaacccatatcttgaaaaggccccctagcataagcgcagactccgcgaaaacagaagatgccctgattgacgcattggagcaaatctatcaaaagtacgggaagaaatatggctcagtaatgacagtgcagccaacctcccccttcaggaagccatctaccattagagatttcaagaatgcctttgatagaaatcccgaatgcgatgctatgctgacgctcaatgcggtctacacggatttttggattgaggaagaaggcgggtatcatcgtttaaatcctgaagcgccaagacgcaggcaggatcgagatcctttatatgctgaaaatagttgcttatatattacagaagtagactccctcctcgaaaccggttccgtgctgggtcgaaaggtgcaaggatttttgattaacgatcgtgaagcaatcgacatcaatgagccgattgatcttctgattgcgcaggtactttccgatgcggaacgaaccggactggcaggcatttaacaacgaggcgatagagtaagagagggccggctagaacaggttggctattgattccagcgtatcccgataatcggtactaaagtgctgtcgaccattaactagtacgcaaccatcggggtgcaggctgctccgtaagtcccggagatggcatgaggtgtggatacccgacgaggaatgcggggtcgcgcgcgacctctcgcaggtcctcgaggacatccgatgcaacctcgtgcgcgtgaagcgccgccgacgcacccgctcgtccgccatgggcacgtctacgacgagcccaacgggaacgacaggcgcaaggacaagcggataagcgcccactgggagcgggtccactcgatagagctaggccaggccgccgcgcgcgacgccatggactacaacatctccgagattcgtcacctcgaggcccagaagaaggccgtcgagaaggagatcgcagaatgcgcagaccagaagaggcggaagggctgcgtgggggctttgcgctgcctgaagggtatcgaggccatgacggcgctctcgttcgttgtcgaaaccggcgcgttctcccgcttcgacaacgcacgaacctgctcatcatgaatcgggttcgttccctccgagcattcgagtggcgagaaggtggcgcgcgggggcatcaccaaggcggggagctcccatctgcacaagcagctcgtcgagtccgcctggcgctacatgcgggcgactcgcgagaggaagcgctcagaatggacgaggaggtgtcgcttcatatcaagaaccacgcagctaaaggagtgaagaggctcgaggagaggctcgcccgtttcgccgagcagaggttctgttttgtcgtcaccaaggtcatgcagggatagtatcagggccaggctaggagatatctcggtctggcttttcattggtttttgacaacattctgctcgttaggggaatccggtcataggtcgatactcggtggttcgttctttagcaagctgctaccgcagctagccaaggagcaattaaaagctacttcaattctggaagtttgagaagattgccatatagctcttcatattcgaacggctcaatcttccctgtaccaccctgcgggagccaagttagctcgcctacatataccttatcttttacaacataggtatcaacacgaacaaaggggaaatcctgcgacagctttttggcaatcattaacatctcgtcaagcattggtggtttttctacaatggcctcgggcttccttttgcgtcccatgtctacggaaataaactcccacgtcgtcgtataagtgttcctgtagtactcgtgaagcttgtttcccatctcatcggttgactcgatatcatggcaaatgaaagctggctctccattgaaacagaatacccggtagtcatcgggtactttgccgtcagccgtttccagcaattcttcagctaagataatcgcatttccgtcgtacacataatcttcgaatatatgctttttctttcgagcttcgtgcagccaaaacgagaacttgttgcggatctcttgctgccttttcaggtcttcaactctctctctgagtactaaattcgatcccgacgattgggaaacttttagtatgcatttttcaggcagcgactcgaatggtatctcttgcgcagattcgtatacgcccaacagctttggagtgtagcgattcgagtccagtttttccgaaaagtactcacgagcacgatatttgtcgtagcagcgttgcataagatctttgcggtggacattataaaaactttgcaaccatatcattttgtcagtgtacagctcgggatttgacagtcgtagcaacctgccttgatatttcagatatgtatatctcacttgcatcgacctcgggaagagcattttgataaaaccttttaacgtcatgactctagccatccttccgcgtttttgaaaagcgatgcaatagcggtatgagcaaactcgacaaatacctaaattcgacactagatctgtagaccgcataccacacaacgttaggaacaatcacgcataatgcgagttttagaaagaagggaatcaggccgcttcctcccaagggcacacatgccaaatacaacacagcggccgtcgcggcaagaagaacgaaagatttggcgtacatcgaatagaagaaaaccggcttcctattgaacacttccctgcaaaccacaaacggatcaacgaggagcgcgaccacttctccgcaacagcaacccagaatcgctcccgccacaccaaaccccaaatgaacaaaaaggagcgcgcttgcgatgttcacaaacacggacgcaacgtagcgataccgggtattccaatacaatcccgatgcctgtcgataactgattacggctcccatcaatccgtcaattgcaagcttcaacgtaagcgccaccaccacatccattcccaaaacccattcgccgccaagccatatcgtgatgaagggattggccagaataaggaacgcaacgcaggaaagcccgtaagcccaaaaacatgcaagatgaagagacctgaaaaccaattcgcttttctctaccgattcgattgcgttgaggtttcctacgcttgcgacaacaggggcgaataccgctcctaaaatcgccatgattcctgtcaggagaattgcataatttgagtagtacccaacgaaaataacaccgatcaaagaggaaatgattaagcttgtcgcggaattgtttatcgcagagcttactttatgcaaagcacctccatacacgttcttcaggatggaattgcgctccgcctcgttcagcttttcggcattcgcatccaacgtataagggtagttcctgtcgacgtaccatgccgtcatcgcattaccggctatcgtcgttaccgccccaatggaaacgtaaaggtaaaaggaaagttcaggctgatcgctcaacaagacaaggagcgcaacttgaacggcgaccatgaccagcgtggctcctgtgttgatcaaggtgacgacgtattctttctgatctgcggtcagcagagcctttttatatgcaaaaaaccaatacgaactcacagttcgagctaggtataatgcatagacgatatagatgttcaccaaatcggtcgagcccgtaagcagataaggcaaaaacggcgttagcgctgcgccggcccccaggaacacgaatccaagaatcctgtacgtgttgcagtagaagtgcagcagcgatttcactctcgattcgtccccttcggccaatggcttgtacaaagcgaaaacgatgacagaggagagtcctaaatccgacaagtttagtatcaccaaaacgttggcgaaaaggctgtcgatccccaagtactcaaccgatagcgtgtacgcaaaagcggtcctcacgacgaagtttagaaccaggacgagcatcttgcacactaggccgacagcggcatttctcataaagctgaatgtacgcatcaggacaattctgagagaagcgaaataaggctatgcgagacggttgccaaatctgtttcatccaaatacggccccatcggcaggctcagaaccgtctcgcacaaccgcttcgccacggggcatccgccggggcacagatgcgcgccctcgaacgccctctgctcgtgcatgggcttgggatagtaaaccatggtggggacgccccgctccttgagcgaggcctggagggcgtcccggtcgaagccctgcggcagctgcacggtgtactgcgcccacgagctgcggcagccctcgggcaccgtcggaagcgcgaggccgcttccggcgagggcctcgtcgtagggcgccgcggcctcgttcacggcgtcgagctcgtatcgctcgaacgcttcgagcttcacgagcaggatcgcggcctggatcgaatcaagtcggctgttgatgccgacgcgcacgttgtcgtacttcatcgaccccttgccatgcacggcgtaactgcggatcagctccgcccattcgtccgaatcggtgaacaccgcgccgccgtcgccatagcagccgagcggcttggcggggaagaagctcgtggtggagacgtcgccgaacgagcacgccatcttcccgtcgatggagccgccgaagccctgcgcgccgtcctccaacagcagcatgccgtggcgctcgcagacctcgcggatcgccgggtaatccgccggcagcccgaagaggtcgaccgccacgacggccctggggaggaggccggtctcgttctccacgaaccgtacggcctcttcaagcttgacgggatcgaggttgaaggtccgctcgtcgacgtccacgaacgcgggcgtcgcgccgagcagcgccggcgcctccccgctcgcgaagaacgtgaagtcgggcacgaacaccgcgtcgcccggtccgacgccccaagccatgagcgcgagctgcagcgcgtcggttccgttggcgcaggttatgcagtgcccggcgccgacgtagtctgcgagccgggtttcgagctccgcaaccttcgggccgccgatgaaacagcccgacccaagaacgccgagcgaagcctcgacgatctcgggctcgagcgcccggtactgggctttcagatcacgaaattccacgctgcacctcattcagtccctcattgccttgcacgtacgtcctcccgcaaacctcgcatgccaaatcttcggaaaggacggctccgcattcgcatgcccatccatgctgccgcgccggcactcccagcatgagcgcatgcggccggacgtttgacgtgaccacggcgcccgagccgatcatcgcccatgcgcctatttcgtttccgcagacgatcgtcgcgttcgccccgatcgacgctccttcgcgaacgaccgtcctcttgaacgcggcggggcctttggggtatttcgccctcggcgtgaggtcgttggtgaacacgcacgacgggccgcagaagacgtagtcctccagttcgaccccttcgtaaaccgcgacgttgttctgtatcctgcatccgtcgccgatgcgcgcgtttgccgcgacgttcacgttctgacccaagctgcaatcgcggccgatcgatgcacccgactgcacatggctgaaatgccatatcctcgtgcccgcaccaaccgacgccccttcgtcgacaaacgcgctttcgtgcacgaagtagccgggcatcagaaggcgccttccatgtcggtgctcgcgaaatcctggagcggcagcttcacgggcaggcccgtcttctggctcttgtacatggcgagcacgacctcgagcgcgtcgcggcccgccttcgcgtccacgcggggagcgcgatgctgcccgatcgcctcggccacgtcggcgaacaaggcggtatggccgttgccgtacacgttggaggtctgctcctccaagcctttgatcgcccggtccgactccgtctcgtcggcgaaatcccaaacgtcgatcgtgttggtggaggtgcccccgatcttgacggtgccggactcgccgaacaaatacagcgtctcctcgaggttctccgggtgcacgttcaccgttccctcgatggtggccacggacccgtcggagaacgtcaagacggcgacgcccacgtcctccgcctccaggtaatcgtggaaccgctgccgggtctgcgcgtacacggacacgatatccccgcccatgagccagcggagcaggtcgatgccgtggatgcactggttcatgaggcagccgccgtcctgggcccaggtgccgcgccacggcgcctggtcgtagtagccgcggttgcggttccagcgcacgtggacggagccgtgggacatgcgtccgaagcggcccccctccacggcgtcgcgggcgtgccggacggcgacgttgaaccggttctgatggcaggcggacgcgacgacgcccttctcctccgcgcgccggacgatctcgtcggcgtcctcgatcgacatcgcgatgggcttctcgatcacgacgttgatgcccgcctcgatgcagtcgagcgcgatgcgggcgtgctcgccgctctcggtggctatgctcgccagctcgatgtcgggattctcctcgatcatctgcaggtagtcggcgtagcgctttgtagccccgccgtcgtaatccgttttgcggaagagcgcgtcgatcttgccgagatcgatatcgcaggccgccacgaactccatatcgttgttcagggcggccttcacatggttcgctgcgatgcggccgcagccgataagtgcgtacttcatcctacagcacctcgaggttctctctgggggacacgcccttcatggcgttcttcgtgtcgaggacggccttcgcgtgcctctgcacgaatccgtagtcgacgttggtgtgcgcgcacgtcaccagaaccaggtcggccgaggcgatagcctcggccgacaggtccgggatggattctcgctcgacgcccttgtgccggcagctcggcacccaggggtcgtagtaggacacctgggtgccccgctcctccaggcgctcgatcacgcgcagggcgggagattcgcggtagtcgtcgatgtcctgcttgtacgccacgcccagcacgagcaccctcgagcccatcgtcgccttgccggcgcggttgaggatgcgcgcggcgcgcgaggccacccactccggcatcccgtcgttcacggtcatcgacgcctcgatcatggaggtgtggaagccgtactcgcgcgccttccacgacaggtagtaggggtcgagcgggatgcagtggccgccgagcccggggccggggtagaacgcggtgaagccgtcgggcttggtcttggccgcgtcgacgacctcccacacgtcgatgcccatgcggtcgcagagcatcgcgagctcgttcaccaggccgatgttgacgtttcggtaggtgttctcgaggatcttctccatctcggcgaccgccgggctcgacacgcgcgtgacgcctccctcgagcacggcctcgtagaccgccgcgatgcattcgagcgcctcctcgccgacggcgcccacgaccttgggcgtgttcttcgtcttgtagaggaggttgccggggtcaacgcgctcgggcgagaacccgaggtagaagccctcgccgcacttcaggcccgagccctcctccaggatgggcagtatcagctcctcggtggttccggggtaggtggtggactcgagcaccaccatggcgccttctttgaggtagggcgctatctcgcgggcggacgcctccatgtaggaggtgtcgggcatctggtgggcgtcgagcggggtgggcacgcagatggcgacgaagccgcactcggctatgcgcgagaagtcgcccgtggcctcgagcctgccggccccgacgagggccgcgagatcctcctgcacgacgtcgccgatgtagttctccccgcggttcaccatgcccaccttgtcgacctgcacgtcgaagccgatcgtcttgaagccggccttggccttctccacggccagcggcagccccacgtagccgaggcccaccgtgccgcagacgagggtgcggtcggcgacctttttcttcaggttcatcctcatggctaattattcctttcgtttgtcgagatagtggacaagggcgatcgaggtttgatcacggcaggcactcctacggctaaactatttggcggaacatccgtcagtacaactgcgttcgcacctacgattgaactttctccaacggtgacgggaccaagcacacatgcacctgcataaattacggcgtttttctttatcgtcggataatcatgccccttctccaaattggggcaagtcttgccgctaccgccgagagtgacgttttggtatatcctgaccccttcttcgaggacaacgttttcatggaaaacgcatccaaggccatcgtgaaccaacaccgcgcttcgcgctatgttcgcggttggtttgatgtcgcaagcataaatcgcccttacaaaactactgatcaggcgcgggaccattggaacatttcgagcatgaaagctgcacataagctgtatcattgcgttgcatgccatgaaggggtccttttcttgagcaaaaccacatcaacgttcgattccctttcgtcgcaccgtttttatattcacaaaatgccctaaacgatgccttgcttccgaatgtcaatgccattattcagggtgctcaatatgcttgaagcatattgattggaagtattctttcgactgctcgatcgaaaaatgagacaacgcgtaccttctagccgaacaggagtaccttacttgagtctcagcgtctaattccatgtaccaacccattttttcagccaaagcctgaacggttgggggggattcccactgagtagctatcatcaagtatcctgtacgtctctcctacttctgtagcaatcaaaaagcacccgcacgctgctgcttcggctatcgtttgcgaagggtagttgttgatgaggttcgtagcacatagaacatttgcgcgaggtagtatttcgtgtggttttacatagcccggcatttcgaccacatcagaaactccacgctctcggatcatttgcctcaaagcatcttcctcccagcccttgccgcaaataagaaccttgtaacctcgttttctaagcatgggggcacatttgatggcagcttcaagaaccatccgtggattcttataatcctctagtcgagcggcgataaaaacaaacaggcgctctttcttgcctggttgaaataatcttagatcggtaaacgttccaggggtgacggtcaagacggttttaccttgaagtagtttgcgataatatcgctcttgtctcggataaagcagatcaatatgatcagctttttgaagaagtcttcttaacgcttggttttccgtccccttcatagcttcatcgtagtagaggtcattcgcaatagtcagaacaacgtgtttcccaagaaaatgcatccatctgaccataaccctattaaatgggcctgcgtcaaaagatataattacgtcagggtttatcgccataagctgccggagcgaatccaacgtcccaattatcttgtctttaggggcgctgaaccttatctccgaaaaattgtcggtgcagcaagcggcttgatcaagtcggttctgcagctccgttttcaagcatgccctaacgagcacggaaacccgatgcgtgatcccgatctcattgaatatccttaagagtcttctctcggctcctccgaaaggcatatccccacgtaacgtcaaagcgacgctcaaagacttcgaccctggcttcatttgttgatatctatcgatctgccaagtgtttttcgatgccataagagtttgccccttcttttatagccgtactgttcgaccgttttctggcaatcgagcagctttcctctatcgttgcattacccatgagtataagcacgagcgtgaaagcaaggtacacggagtaggaggagaaaaaggcggattcggatgagcttgcaatgagcagataaatcggtattgtaagagaagcccataaatttctacggcgacaaaattgatcgtacaaaacgctacgaaaaaagctgactacaaaagtgaggaacaaaatcaaacctagccagccaaactgtccgataatgataggccagaaactatcgactagatagttggagttcagaggagtcagtccatggacgtggtcaaaaccaagatagtagtaaaaagccggataaaaatcacgtgtaatgtttgatccgtacgatgcaaatcctgcgcctgtggggaaaaacatgtttgcaacctcgaacgacttagagagaaggacgctcctcgcggttccatcattgagataatagagtccgatttgttcataggctattgcaagaaccgccaaacccgccatcacgacaaaagatttcggaattcgctccttccccgggaatatgagaagcgcgatcgagagaacgagaacaagtccgatggcctttatccttgttgttaacgccagcaaaagaaaagcgcaaatgatatagacggcgttcttcttgggatcgagaagcaggagagcaacaaatccaacaatagtagcagcgaagtttgaaggatgcccaaacaggaactgaaaagcccctatcccgaacctcgaactaagagaaaagcccagattcatgaattgattagcaacggctacaagcaaaagaataataaccgcaaccttagcgaagccaacacacatatccaataagcacagcatctctttatcattgagaatgattttagatgaaataaacgcaattgcgaactttatgcaggtaaagaaatcgatgattgttgcctcttgataaacctgaatatcgcgtaatacgtttcccgtaaaacccacgatgcacagaatcgcaagagacacgagacatatagcgtcactgcggttgagttgacgtccctttttgtgatggaaaatcgcgctagcaacagcccatacagcaaggaaaacagcagagccttcgtcaaggtatgaaaaagaaagagatattttatcttgcaagacgttctcgaaagcaagtagtagaaatagaagaaagagcactatttctttaactttcgcttgcggcagattacgcaagaccatctagcaaactcgcctttgctttaagcgctggagcaagcggaagaaagtggaatacagtttcggagatattatctggatgcacgccttcgtcttcacggctagaggtatctgcttaccatgaagccatttccctgcatcgcttttcaggaacctttgagcctctttacgcgctctcaggcatgcctcattgggttcgacgacatcaagccataggttttcgagtctcgcatactctaatagctttctgctcagcacctcatgctcaaactcgccaggaaacatctgctctgcataatcgcagcagtcatgaattgcagcatgataatcaaggtattggcgcgcgctcattttgctttttctggttatggagtcgattctgaacacttgtccgtaggaggcagcgtcaaccgagtaaaccttgcccactgtactgattatttttgacataacagacaagtcttcatataccctatcttcgggaaaaggagttgatgcccatatatctttatgagccatctttccacaagccgacacgctaagccctttccctagaagcatttgcgagagcgcttccttttgcgacagctcaaggcagtcgactttactccatgacaagtttgggagcgagtcttggtttggtattgaaattgcgctcacgctggaaatacccctgttgtcgccgtgcagagcgcgcgctaagatttcgacatgttgggaacgaatcacgtcgtcgccatcgacgaatgtgaggtactctccctcaacaagaggcaatgctgcatttcgcgcagatgagagtccgccgttttctttatgaatcacttttatgcgatcgtctttgtcagccagtgcttcgcataagtctgcagaagagtctgttgacccatcatcgacaagaattacttcgatcatgctatatgtctgggtcattatactttgcacgcaacgttcgatgtagttttctacgttgtacacaggtaccacaatcgacacaagtccatttaagttatcgtgcaaatccgtctcttcatttagactgagagctatcttgtactgttgccgactattcactatctgcctccaaatagcatcttgcacaaacactcattacgtagcaatcccctgaaatcgatacgcacggcttgaagccgtgaaacctttccctagcggacttcaggtcggttgtcttaataaatgatctgcgccaacacattagccatgcactcgctagcatgaccgtcgccgtatggattgctcgcgtgcgacattgactcgtacccttctttatttgagagaagacgcgaaaaatccggtaaactacatcctcatcagtcctacaagctttaacgtaccagcggccacagccatgccttcaggaagctcggtcgcgtcccgcatcacgagcgcgggcctacccaagctcggcgcttcttctgcccagtccagctctggatggaggtaatcctcaagaactgtaatggacagagcgtcgatcattgccctccctgctcgcgttgggctttacgcaggatacggtagaaacgaatattgccgacagcgtatcgcttaataagcctccctggctcctgcatcatgcggaacaaccactccaagttcgcccgctgcatccatacaggagcgcgtggaatgttgccggatacgacatcgaacgatccgccaacgcccacaaatacacccgctacctcctgtgtgcggaagtattcaatcagctgctccttcttcggactggtgatgcctacgaacacaatcgcggggcgcatcgaagagacctctgcaacaacagagtcaaactcgcactccttgaagtaaccatctcgatatccacagacattcatctgcggatactgctcaataagtgctttcaccgcactctcaactacctcagtcttagcacctaacagatagacggaatatcctttctcttcagccagatcgcaaagcttccacataagatcgatgcccgcgacgcgttcgggcacttcgatgccgagctttttggccgctatcaccatggatgcaccatctgcattcactatctcgcatcgacgaacgcatccgtccatccagggatcgtccctcatttgaagaagcttgtcagcgtttacaccaatcacgtgcgcgaaggatcccatttgtgcaagctctccaattcttgagacggtctgctgcatggtccatgggtcgattggcacgcccataacctctactcgatcagggtagctatgcgtacttgccatcagcacgcccccttgccgtcgaacatcgtgattaccgtcttcgctatcacccgcaggtccgtcgcgaaggagcgctcctcgatgtaggcgaggtccatggcgaccatgtcgtcgaacgtcgtgtcgctgcggcccctcacctgccagtagccggtgaggccgggcttgacggacaggcggcgcatggcgcgcccgtcgtactgggcgacctcggagggcagcggcgggcgggggccgacgcaggagagctggcccatgaggcagttgaggaactggggcagctcgtcgacggagtgcttgcggatgaagcggccgatgcgcgtgacgcgcgggtcgtccttgatcttgaagagcgggccgtcggcctcgttgaggtcggcgagctccgccaggcgctcgtcggcgtcggcgctcatggaacggaacttgtacatgtcgaaggtgcgcacctgcccgtcgcgcccgatgcggccgacgcgcttctgcgagtacagggggttgcccgggctctcgaggcggatggcgacgcacaggatgatcgaggggactacgagcactgcgatcgcggcgagcgagaaggcgatgtcgaaggcgcgcttcacgaagcggtaggcgaggcggcggtcggcgcgctcggggacggggacgggcccctcggcctcggagaccagctcgggggccaggaacgccacgt

SEQ ID NO: 53 - DNA, 7758 bp, Eggerthella lenta
  source 1..7758: mol_type = genomic DNA
gaatctccgcccttgagtcattcggtcaaaaccagtccagctaggcgatgctgtcccgttcgctcgactcgggcttaccgccgaaagcagtcaaaattgctggtgatctctaattgactaacaggaggatcggaaagacatgggaaaaaatttgaaggccgtgcgccgcgcaataaagaaattcaagagcgatccccagtttagggcaaagttcctctacgcttctgcttttgacaaggctcctcgaatagacgagcatcgtgtcctgctcgaatcgttcaacgggaaaaattttggcggcaacccattttacctacttaaagaattgcgctcgaacaagcaatatgcccacctaaccgttattgtagctgttaatgaaacccgcattgaagccacgcggatcctgctggacaatcatggattgtccgatgtcccaatagtagccgtccattctgaagagtacgtagatgccctcgttgcctcaaagtatctcgtcaacaattcgacttttcccacgtacttcataaagaggtcggggcaaatctacctaaacacgtggcacggaacccctcttaaggctatgggaagaaaaatcatagatgagcctcataagacgggtaatacgcagcgcaatttcctcatgtcagactacctgctctatccaaacgaatactctttcgaacattttaaaaacgactacatgatagctccgtatttttccggcaaatacgttttaagcggttacccgtgcaacgccgtgctctacgacaatgagctaaagcaagctatgaaagaaaagcttggcgttgaggacaagcgggtcgtcgtattcatgccaacctggaggcaaggaaaaaagaacggccataaaggtaagcattctcaaatgcttcaattcattctgatgacgcttgacgaacgacttgatgacgatgtcgtagttttcgccaagccccactattacgacacccgaaagatcaatttcaaaagtttcaagcacgtaaagcagtttccttccgatcttgaaacatacgaagtgctgtctatggccgatcttcttgtcacggattactctagtgttatgttcgatttcttgaacacgaacaaggagatcgttctctttccttatgaccaggtcgaatattttgaaacgagaggagcttatgtttcgttagacgagcttccgttcgatcggacaatcgatgtatatgatctttgcgagagaataaacaaaaccacgaaaagcgagtcgaccgcttctcgctatcccgaggcgaggaaaacatactgcccttacgactgcgaagatgcagctaaaaagctttgcgatttgctgttctcaaagaccgagcaagacatgatggtcattccgggcgcaaagtatcacaacgacaacccgaacattattatttttggcggggcgctgacaaagaacggaatcacgtcgtcgctgcttgggcttttggactccttagacttcgatcaggtcaattaccttgtaacgtacccatcaaacaagggcgctgccgtcatcgaaaccataaacggatttagcgacgaccttggctactaccccatccagggtgagcaagtgatgacctattcggaggcaatagctcgattcctgttctttagattcagcattgagaatccctggatttcaaaaaggatcaaaagcctcttttctcgagaagcgctccgtctctttccttcgatgtcgcttacaaggtgtattcattttagcgggtatgagcgaagctggatgcaccttatcctggggatggagagcgaagagaacgtaatctacgtccacagtgacatgttgcaagaaagatctatgaggtcgaactatcacataccgtcggtaacgagggcttatcgggagttcgacaaagttgcagtagtgagagacggtttgaaggggatcattgctcagggtttcaacataagtcctgacaaaatctcggtggttcacaacataaacaggatagatcctatccggaatctcgctttgcaagacgtgcattacgatgcccagaccagctccaacatgcccatagaagagctgaaggcaatccttgaggacaagtcgataaccaaatttataaacgtcgggcgcttttcaccagaaaagggccatatgcgactcatctctgccttctgtcgctactcggatgcgcatcccgatagcgcgctcatcatcataggaggacacggggtagaccatcgcaccatcctcgacatggtcgaggggcatccaggaaaacgcatcgtaattatcaaaagcttatcgaatcctttccccattctggcttcttgcgacgctttcattctttcgtcgttctacgaaggcttgcctatgtcgatcatggaggctctcatcttggggaagcctgtcatctccacagcgatttcgggtcccaaggagtttcttgaacaaggctatgggcgcatcgtcgacgattcagaggacggcctctatgaaggtatgtgcgatttcgagaagaccgggctttccgatctcaagagctttgatgctgaagcgttcaatgctcaagcggtaaaagagttttacgatgcaataggtctttaagcgcttatgtgcatgctctcgttcgcatgcacattgcggcaaaacgaacgactgctagaacccttcgagtcgtcatcaagcgatcggggggttctgttgtggatcgggcactgaatcgtttttttgaaaactaacaattcccacgtattgcttcgatgcgggaatcaaacacggaccgtacggggcggaggatgttcgacattgttgctgttgcctgaccggtttatagcatggtgctgcatggagctacatcctctgtggtgtcttcttcggctgcatgctcgtttggctgccgcatacgcgtttgctgccttgttggtctaatgggttctcattctggggttttgtgcgcgtgctatcattgatgccgaacagattcacgcatgatggaagggtgaggttttgggaccgagttcgaaccgacgggctccttacggtcggggtggagagcgcacgccgggcgtggtttcgccgtatgaccgcaatcgatcttaccggtcaagttcgcttcagggtcgcccagcgggcagctcggtgcgcccggcgcccaggcccaccgcgcagcagctatatcccgagcgtgttaggaatcgaaagcgcaaccggctgatcaggcgcatcggtttgtgcgtactggccgtgctgctcgtggcggtctgtgcgacaggtgggtatgcgctgtggtattcaaatgccctcgatggcgctctgtccatgggctccgagcaggatgcttcggttgactccgttttggtgaggcccgaaacgggcaagcccttttacgtgttgcttcttggttccgactccagggaagggtcaggcacgtcgaagaatcccgacatgcaaggcgacaaccagcgttccgacgtgatgatcttagcccgtgtcgacgcaggcaagaagcaagttactttggtgtccgtgccgcgcgatactccctatacgctggacggtgggagcgttgttaagatcaacgaggtgtacaacatcgaaggagcggccggctccatcaaggccgtgtcgaagctgacgggtgttcccatctcgcattacgccgaagtgcatttttccgagtttcaggaaatcgtcgacaagctgggtggtataacggtggacgtgcctatcgaggtgtcgtacaaagatgcgctcacgggcgacaaggtcaccatcaagccgggcgtgcaagctttgaacggccagcaggcgcagatattcgcgcgcgctcgtcatgagtatggcgagaaccaggaggcgaagcggcagagcaacatcaggacggtgctcatggccattgtcgagaaggttctcgagaaacccctggccgaattgccgggcacggtgctcgatcttgctgagagcgtgggcaccgacatgaacacgtcggacatcctgtcgctcgccctcgatttttcgggcggctcgggtgagatgaccgtatacagctgcaccggccccagcaacggcgatttcatggagcagcataacggtctatggttctgctacgagaacccggaagggtgggcgaacctcatggccgcggtggacgccggcgaggatcctggcgagctggacgtcgaatcgactgcgatcatccctgcgtcttcggacgcgtcggtctgataggcatcaaggaaggacgagaggccatgccggctgtttccgtgatcatacccatgtacaacgtgcgtccctatatcgaggactgcctgctgtcgttgaagcggcagacgttcggcgatttcgaggcgctgtgcgtcgacgacggttcgaccgacggcacgctggaagccgctcggaaggcgggcggcgacgacgctcgcttctcattcctttctcaggcgaacgcggggcagtctgccgcgcgcaatgcgggcatcgcccgcgcgacggggaagtacgtcgtcttcctggattccgacgattactacgaggatcgtgcgttgcagatgctgttcgagcgggcggagcgcgacgggttggacgacctgttcttctcggcccgcacgctgtacgaaggggaggacgtgcgagcgcgctatcatgatgagtatggcggtcgctccgacatcgacggcatcatgacgggtcgcgagcttatggtgcgcttcgtcgaagaggattcgttctgcgtgtctcccggaatgcagttcgtccgtaaaagctttctcgacaaagttggccttcggttctacgagggaatcgtgcacgaggacaacctcttcacctgcctcatgctggccttggcgccgcgaaccggctttctgaacgagtctttgtacgtgaggcgggtgcggcgcggctccacgatgaccgaggatcgcgagatcaagcacgtgtacggtcacttcaaggcagcgtacgagatcgaggcgtggctgcgcgtccatgtgggggagtgctcggaggcgttcgtccgcgttttgctgcgtcatgtggcgttctgctacgatcgggcggcgttcgatgccctgtcgctcgatgaggcgcaactagaggcgtgcgcgacccagctgggcgcatcggatcccgacgagggtgtgtcgtttcgcttgcacgtgattgagcacgcgcgagaaaccgggggaattcgtcaagagtaccttggctccacgacgtaccggataggccatgctatcatggccctgccttgtcgactcaaggagcgcttgggtcgttaggcgcactgctcgaacgaaaggaatggtacaggtgaaattgaagaacatcgtgcgctacggtgcggttgcggcgctgatggcgctaacgatggcagttatggttagctgtcagaaacaggagcctgctgcggagtcggagcccaccgatacgcagctcatgcaggaggctgccggcgatgcgaaggctcccttctacgtgctagtggttggaaacgattcgcgcgttggaacgactcagatctcgctcgaggactacgccgacggcacggggcgctccgacaccatgatgctggttcgcgtcgaccccgttacctacaagataacgctagtcaccgtgccgcgcgatactgaggccgactacgaaggttcggtggtgaagatcaacgagctataccgccagggaggcatggaggccgctgtcgaaggggtggagagcctgactggcgtgcatgttcagtactatctcgacatgggtttcgtcggattcgagaagttcgtcgaccagatcggcggagtcacggcgaacgtccccatcgacatgcatttgaaggacatcgtgaacggcggcaccattgagctaaacgccggaacacaggagctcgacggccccgaggcccttgttctcgcccgtgtgcgcaagctgtacgctgccgacatcgaggcgtgccgccagatccaggaccgccagctggtcgaggcgggcatcaaacaggttgcggccgacccggcgaacgctgctacgcaccttgacgcgcttcttggcaatgccgaaacgaattggccgaaggacgagctggcggctatggtggcggacttcgccgcgaacgccgacaggatcgctttccagtcgggtaccggtccttacgttggcgactttatggaggagcatgacggcctctggatggttcctcgcgacgagggaacgtggaggaaggttatcgaagtggtcgaatccggcggcgatccgacgacggtcgtagccttgcccgaagtagaagcggcgtaagccacttagtatgcaagaagaccccgaatgctcggggtcttcttttatttcccgccttcgcggctgcttttcctcgtcacgtatttcttgaaggtgcgcagagtgaaccaaggacctacgttgcgtaggttgtacagcccctgcttgacgagcccccaggcgtagggcgcgctgcggatgtacggttcgggcatgccgcgcagttcggcaaacatgcgcttgcatcctggaggtatctcggcgtcagacagaacaagatcggtatccattcgctcgaacatgcgcgtggctgccgcccgcacctcgtcgttcgtcaggtcgacttcttccaggacgccacctaggtaggtgaagccgcggctgttgtgggcgcgcagcacggcttcgtcgcggatgcctatgcgttcgagcgcatccatcatgtcgttccatcggtcaaaaggcaatagcgtgttgttcagcgcgaaggacttcgatttctcgggcgtttcctcgcggtagcagtagtacggttcgtcgagatagacgatgcgctcggcttggcagagcgtctctatcagaaacgggttgtcggcccatcccgctcccggatactcgcggaagcggataccgtgcttttcaaggaatcctttgcggtagatggccgaccatatggacggatggtgcgtgagcagatgcgccgcgtcgcggatgatgaacggctggcaaggcggcttgatgcgacggcggtagctgcagttcagcttgcgttgctcgggggtgtcgggcatccagatgcgccagtacggggttttcacgatgtctgcgggatcgttgaaggttgcttcgaaagcgagcatgtcggcatacatgccaggttcaatccagtcgtcgggctcgacgatggagatccatgcgcctcgcgcctcttccagtccgcgattgcaggtggctccgtagccttggttctgcttgtcgatgacgcggatgcgctcgtcgcgagcggcgtatgcctgcatgatggcgagagagccgtccgtgctgccgtcgttcaggcagatgacctccagctcgcggtgcgtttgcgcgagaatgctgtcgaggcattgcgcaaggtacggctccgcgttgaagaccgggacgattatagagacgagctgattatctacgttgcgcatgaagggcctttcttttcctattcatccacgaaatcagcgcacgcgccggaatcgtcgaatatgtagcgggtgccgtcgattaccgcggtgccggtcgccatggctccagaggaggggtcaagatagtaccatgaccctccgttctcgagccagcccgttgccatcatgcctgattcgggatccatccagtaccaagctcctcccgtgagcaaccagccggtttgcatggctcccgatccgctcaggtaataccaagcggttccttgtttcagccagcggctcgactgcatggcgccggagccttcgaagtagtaccacttgccg

SEQ ID NO: 54 - DNA, 7358 bp, Eggerthella lenta
  source 1..7358: mol_type = genomic DNA
aaggttgtggaggcgaccaccgagcaggccatcgacgaccaggtgaaggccgcggagtgcttcatcatcaaggtaggcacgaagataggcgatgacgtcaccgagggcgacaaggccgacgcgatacccttgccgggggtcgagttcagcatctacgcctccaaggacttcgtggataacggcgacggaacctacacggtgcgcgacggagccgcgccctatgccactatcgtaaccgatgagaacggcatagcggacacgtcctacaacccgcgaccggacgatcagcacggcgcgttgccctacgatgactacctggtgatcgagacggggccgaagccgaattacgatcccatagagccgttcacgttctctgcccgcgaggacaagaaggtgtaccacttcttcgccaacaacacgtacgtcactgcgggcgtcgagctcgtcaaggtggacgccgagtcgggcttgcccgtgctggttgcgggaacgcagctgcaggtgctcgatgcgtctaagacccccattgtgtggcacgagacgtatcccgaggcgatcagctacgacactctcacggtcggcgatacgggccgcgtgtacctgcctcagaagctcaacgccggatcctactaccttcgcgaggtgtccgcccccgagggctacctgctcggccatgccgacgtgcccttcacggtgtcaaccacgacggactgggatgatccgcttgtggtcgagtacgccaacatgccccagaagggctctgtaaaggcgatgaaggtggacgccgagacgggcgagcccgtacccgctgccggcatcgagttcgacctcgtcgccgcgtctgacatcaagaccggcgacggcgtggtgcacgtgcccgccggcgagatcgccgcgcacattgtcacggccgccgacggcaccgcaacggccgaagatctgtacttgggcagctaccgcatcgtcgagacgctcgcgcccgacgggtacgtgctcaacggcgagcccgtcgatgtaacgctctcatacgccggccaggaggtcgaagccgcctacgccgagtccgagttcggcgacgtgccccagaagggcatcatcgaggcccacaaagtcgacgccgagtcggggctgcccgtcgcggtgcccggcatcgaattccgcgtgaccgccgccgccgacgtggtgacgcccgacggcaccgtgcgcgcccatgagggcgacgtggtggccgaggtcgtgaccggggatgacggcaaggccgagacgccggagctgtacctgggccgctacgaggtcgaagaaacgctcgcgcccgacgggtacgtgctcaacggcgagcccgtcgatgtaacgctctcatacgccggccaggaggtcgcggtgacgcgggccggggccgtcgtggaggacgcgccccagaagggcgtcatcgaaatcgtcaaaaccgacgaggccgacgggcgcgccgtgccaggcgcggtctacgaggtgacggcagccgcggacatcgtgacccccgacggcacggtgcatgcgagctccggcgacgtggtggccaccgtcaccacgggcgatgacggcaaggccgagacggatgagctgtacctgggcgattacaacgtgcgtgagacggccacgcccgacggctgggccatcgaccacgagacgcacatggtcgagctctcatacgctggccaagaggtaaaggtgacgcgtaccgtgctcgagacggccgacgcgcccaccacgttcatattgctcaagaaggccgagctgatcgacggcgagcttgtcgactatgcaggctcggagtggcacgtgtgggccgaggacgcggcgggcgagatagcgtacgatgccacggccacgaccggcgaggacggcagcttcgtcctcgagcgcatcccccacggcgacgggctcgcctactactgccaggaaaccaagacaggcgatgactacatcctcgacccggaggtttacgaattctccgtcgacgaggagggcctgatcgcaggcgagccggcctacgtgttcttgaacacgaactaccacaagcgcatcatcgaggcccacaaagtcgaccaggacacaggcgagccggttggcaagaccggattcgggctgtaccgctggatcggggagggggagcccgacccgacgttcggcggccgtcagggcttccatggcgtgttcgcggatgatcccgacggcgaggtggacgggagcctgtgggagatggtcgccgaggggacgaccgacgacatgggcgccgtcatcttcgagggcctggagttcggctggtacatgatggtcgaggcggtgccgaaccccgattacgccgagtggtgggagtcggcgggatccacctggggacgctaccttttcaaggccgacaaggacagcgacgtccggcagacgcagacgtacggcaacatggccatatcgctcgaatgcaacgtgagcaaggcgaccatcgaccgcacgagcgcggcgttccagtcggatgagcgcgcacccgttcgcgtcgacaacgtgggcaaggagcgctaccgctacgacgtcgcgttcgacgcgggttccaccaacgtgagggcagaccagtacgcggtcgtcgatccttgcgagttcgtcaacctgggaatcaggctcgacacgctggtgacgcctgcagcctatggcgacaccgacgggttggtcaacgtatggtaccggacgaacatgaccgatacgtcggccgtgtactcgaccgccagcgcgaccgccggcaaccccccgaaccagatggccgacggaaccgaccgcatcggcacggtcgggtggcgcctttggagggagggcgtcgccgccggcgcccgcacgcgcctcgacgtcgacgggctcggcctcgccgccggcgaatacgtcacgggaatcatgctcgaatacgggtcggtcgaggtagggttccgcacgctgcaggacatgagctacctggtgtacgcaacggagcccctggacaacagcaacggcgaggtggtcatccccaacagcgtgacgagccatatcacccgcaactggagagacgggcaggggctgtacgacgacgcgcatgacaacgtgatcacgcgggtcatcgacaccttcggcttcgcatcctcctatcacgggttctcgacgggcacggcaggcaacggtggcgcgctcaccgcgacgggcgaccgcgtcccggccctggagggcgtggccatgctcctcgccgcggtggccgccgtcctgctgggcatctgggccacgaggcgcgaagaaggggagggggcatgaggagggccctggccgagcatgcagaggacatgctccgctacatgctggacaactccgacgacgtgcggaggatcgtcgtcggccggaagaagctcgtgagggacctgcagatgaacccgacaacggtgtccgtcgtcctcggctacctcaaagagctcggcctggtcgaggtgaacggccgctatgcggagaacggcgcgcagttggagaacgggtacacggtgaccgaggcaggatgcgagttcgtcgccgaatcccccaaggctaggaggtagcgaatggcatcggaggaagaggtcgtacggttcatcttcaacggtgcgaacgagatggccgagctgatgtaccagctcatcaagtgggccctcgagcgccgcgagaaggggagggacgacggccggcgcgacccctcgaagatcagcggccgcatagccccggaggacgcggcgagcttcgccgccgacctcgccgcggcgggcataggggccgagtacgtggcgcaggccgacggcggcctcgtctactcgtgcgacgccaagcacttcgagacgctcaaggcgctcaccaagggctacgccgcgaagtacgacgccatgcacccggaatccgttgacaacgtctactacgagacgctgcgggactggcgcggctgctcgctcaacgagtgcttcgaggtggcgtccaccgtggaggtggccgccgtgaacaagatgcgcgccgacctcgcagccatgggggtctacttcgaggtggcccgccgcccggagaacctcggctacgtcgtcaagttcaacgcgaaggacgcgagcatggtggagcgcgccctgtgcgagctcgaccaggcgtacgggcatccccagagcgcccaggacgtcgcgcgcgccgtcgcgggctacctcccgtctcccgccgagggcgtatggaaacgggagggagcccgctcgacgctcgaggcgaggaacgccggccaggacgaggtgctggccgccgcccacgtgtacccggagaacgggggatggcacgtttacggcgaggcggcgggggagcgcttcggcgacggcgtctacggcaccgagcgcgaggccgtgcaggcgggcgagctgctcgtggagcagagggccgccgagctcggctcgaacgtcgagatcccgcgccagggagctgccgcgcgcgacctcgacgggcgcaaggcgggcgactacacgctgaccatgaccacggtcgagtgggaccgggccgcgaacatcatgggaggcccaatggaggaggacggcatccccttctccctgtccttcgacgaggcggcggaaaccgcttcgctcaccttcgcgtccgagcacgccgccggcgtcaaggccatcgcagaccgctatatcaaatcgtcgaaggagaacctcaaggacttcaccactgcgcgcttcgaggattgggacgagttctgcgaagtcgccgagacggggatggtgagggacgacgccctgcaggcgatcagggcggagtggatcgacgtcggcgatggcaggtacagcctggaggcgtacgcgaacgcatgggacgccgaagccgtcgtcggcgtgtcggtgtacgccaaggccgtcgtggaatccgacccgtccctcgagggatgggaggtatgggggaacgccgacgggcccaatttcggcgagcgcggattcgatgacctcgcagaggccatggagtacgcggagtccctggcggcgggggagctcgccgagaggggctacgaggtcgccgtgggatcgcgtcccgaagcgcccgcacaggagcgcggcgaagccgctcccgagctcgacgccccagcacgccaggagcgaaccgtggagcaggcggactacgtcgtcgagccgcgcgacgtcggcccgtcggaaacggtagagacggtggtcgccgccaccaagtcggcggaagtggccgacgatgcgggcgaggcgcacatcggaagctccttggaggagatgacgaaccctgacgggctcgatctgccgagcatcgagcggttcggctccgccgaaaagctggacggcgcgaagatcggcgacgtcctgcaggcatgctccaaagacgtgaagatgatcaaggcgcagctcgaggccaagcgccagcaaggcgtggaacgcggggcgaaggcggccgtgcaatctaagggcgcggcgcgctgatggccaagaacgggaaaaacggggtgcccgtcgcaacgacggcgcgcaagcgggaggcgagccaggggttcatcgccctcatggccggcatctccttggtcgcgttcgttgcggtcaaccatgtggcgggctacgtcatccccgtcgcctcgtcgcgcgggcccgcggcggcgctcacgagcatcccggtagccctgctcgacttcgcgcggagcccttgggcgctgagcctcgacccggccgccgtggccgtcgggctcgcggggccggcggccgtcgttctcgtgtacctgctcggcggcaagaaggccgacaagccgaccatggcgggcatggagcacggcaccgcgcgctggggcgaggaggacgagaaggacaggcacgccgacacggataacccgctgaacaacataccgctcgcccagggcgtcgagctctgcctcgaccccgatgcgatagggacgcgccggaagggcttcgtggagatcaaccgcaacgtgatgtgcttcggcccgccaggcacgggcaagacgttctatctgttcgtccccgcgctcctgcggttctggcggcccaccgacccgtcgagcatcacgagcgacacgaagggcacgaccgtgaagcggatgctgccgtacctcatgaggcacgaccgcgtggtgaaggttctcaacaccaaggatccgtccaacagccacggctacaacccgctcaagtacacgcgcaacgatttggaggtgctcatcgccgtcgacaccatcatgggcaacaccacaggacgcaagcccgatgagggcgtcgacggggacttctgggagaaatccgagaaatcggtgttcgtgtccatcatcggaggcttgcgcgagctgaaggagatagctccggggctcgacgtcgaggtgaacataccgacgatggcggacatcctgctcaccgccgaggcttcgagcgacgacgaggatccgaacacgcccacgaccatcgaccgtttcttcgcgctgatcgagcatctgaagccggacagctacgcctgccgcacctacaaaggcctgaagctggccggcaagggccggacgatgaactccatcctggtgtcgtgcgcggtcaggctcatgcccttcaacctccccgtcatccgcgagctcatgtggcgcgacgagatggagatcgaccgcatacccttcgagggcaccaacttgtttgtcgtggccgacgatgctggcggccagctcgacttcgtcttggccatgttctaccagcagacgttccgcaccctctacaacatcgccgacaacctgccgggggagaggttcccggtcccggtcgtgtcgttcatcgacgagatgttgaacatgggcaacataccctacaaggagaggatcctcatgaccgcccgctccaggaacatgccgatagtgatgggcctccagagcatggatctcgcgaaggagaaatggggcgagaacatcttgggcgcgatcctcgacgcctgcgacacgatcgtctacatgggcggcggccgctcgaaggagagccgcgcgtacatctcggagtccctgggtacccagacggtctacgagcacacggtgagcgagacggtgagcgcccggatcatgggcagcaacgattccgctcagtcgtcgtaccagtcgctcggccgcccgctgctcgacgaggccgaggtcgacaagataccgcgggagcagtgcatcgtccacttctcgggcgccgcgcccctcatggtgggcaagtaccgcacgcaggacacggacgagtacaaggactcgcccttcgcgcccgaccgaaggggcgaggccgtcacagggcccttccctttgcaggagatgagggagcacaacgcgagggtgcgggcat

SEQ ID NO: 55 - DNA, 5942 bp, Eggerthella lenta
  source 1..5942: mol_type = genomic DNA
ttccttccttcaatgcgtttcgagcgcagcgagcgagcgttagcgaggggcggcccggccgcccgtcggcgcagccgacccgtgcctgtacggcccggaggcttgcctccggcttacgcgccgcgtgcggcgcgttccagggttcggggcggaagccccgtgcacgttgtaacgcaaaatttattttgtgttacaacgtgcgtctcttgctaacctccctacagagtttaacgtgctgcgcggcctagcgcaagcgcgggttcgggccgatgggcgcgggtggctttgcacaggctttcccatgaagggaccctacgcggatcccgtaatggaggaagggtgtgtgaagccacccggtggatgctcggggcgagcatccaccgggccgagcggagcgccttctggcgcgacgcgaggccgacgtcgcgattttcgggagccggcctcctggcggcgaaacggcggcgcggtcgttgccgcgccgagtgtgggcaggcgctcgcggctgtccacacttccggcgaagccggcattgcaggttggggtttcctcttcctggtttcagggtctttcaacgtcgacaaggctttccataatcgagcggtctttcgattgtggaaaggcgtactcgcctgttcgtgttccagggtttcggattggttggttggcttagtttggagggcggtcgatctcgaagagccccgctgctgcggcccttttgcccggctcttagagagccgggcaaaagggcttcgggccctagcatattggccgcgccgtccgctcagagcggccggcgcggatacccttctttctcgctttggcgtttaggggttcttggtttttggagcaagaaagcgcgccttcccacaattcggtcgccgcaaagagcgcggcgattttttccacaacgccgatcccggcgctacggaattaatccctagcggttccttcgcgcatcggcgttgtggaaaaaacctaatcggccgaattatggaaagccttgtcgacgttgaaagaccctgaaaccaggaagagaaaaaccccgcattgaaggagaggatggccgccccaaaaatgggcgtctaaacgacggagggccatcgcaggccctccgattccgcctttgccgatccaggaagcttgcgagggcgaaaggctatatagaaaggttctcattgcccccgccggagcaatgagaaccaacaagacaccgcaacgttttatcgggatgcgaccgtctcgtacttgtcgaggtattcagccaacgcatcgcggtatatctcggagggctttacgcccctgctcttcgctatgcggttcgctctctgcaccttctcgcacgggtagacaacggtgacgcgcttcttgcccactgcgtcgaggtgggaaccgctgtacacctgtccgtcctcgtgtgggtagtctccgcgctcataagcggcggcgctctcttcgatccattcgttggtcaaaccatacttggccgcaagttcatctacgttcattgatttcacctctccatccttagctctcggagcgtcttggcgctcggcgggatcatcgcgtggtagacaaggaagctgtcgatatcctcatcgtagacataaacgagctcgatgaatcttccttgcgtatcgaaccctacaccgacccactcgccgctctcgcggcgcgtgtagctcaccatccctcgcacggcatcgtaaacgtcttggggttttatctccggatgacgctgctcgattctcgggtgtatgtcgatgtggctcattgccgtcctttctgcatggtatgaataatatcatactatttactctttttccacccgccgcccttgctccaaggatgcgccgctagtgtctcggcccagtagttcatttatcagcagccgttcatcgacgtggtatttagggaggggcatccaccagcaccacgccggacgattgtcttcatcatcacttgggcgagtgctctgaacatgcaacaggatgttagggatcaatttgtagcgtccatgattaaaacgggatgtcttcgtcgtagacggatgctgtagaatcaggcgaaagggacgacgggatggctgcgaattccgcgttggcgtcgtagccgtcggtcttattacggctggacatgaactcgagctcgtcgacgatcacctcgatcttgctgcgcttctggccctcgcgctcccactggctccaacggagcttgccctcgatggacactttggtgcccttgctgaggtaacgcgaaagactttcggcgcgcgcgccgaacatcgtgcagtcgatgaagttcggataatcctcccactcgcccgtctgctggttcttgcgacggtcgttgaccgctacgccgaagccgagcacgggaagcccgctcgcggtggagcgaagctcgggatcgcgcgtaaggttgccgctgatgataactcggttaatgctcatggtcttcttctttcagatttggctgtcttacgagatgcccggtctgttctcatagatgccgaagtacccccttccattcgtgaataataacgcaacaagaaagagtgacggttagtgtccttctaaccgtcactctttcttgttggaaacaggggcgcagggggcgtagcccccgctgaaccgccgtgacggctatgggatgacgtcgagcaccgtgccgagcaccgtgcgcagaccctccccgaacgaggccccgttcgacgccgcggtgaggatcgcgctggccagcaggctgagggcggccacgacgaccagcgccacggcaccccgccctaccgtgtacgctacggattgggccctggctgccatcgtcggcttgggcgcgtcggggtagacgtgccggacaaccacctcccccgatcccgtctgcacgacgttcccccgcgacgccttcagctgcgcgtcgatgcgctgcagatccgcctgccacgcggcggcgtcctcgagcctcttcgccttgacgtcggcgagttccgccaaagccgcgcggagcctttcttccgcgtcctcggccgtaccggccttcgccttcgcggcggcgagcgctgtctcgagctcgctcgaacgcgcccgggcatgctcaagatccttcgccagggactccgagtcgagggcggcctccttggcggcgttctccgcttgcgccgcgcgcttttcggcggcctgcagctcctccgacagcctgtccgcgagcgaagagcggcgcgagagctccgattccgcgtcgtccaggaggccggcgagccgttcccgttccttcaggacgttggcgtacagatcccgctcgtcggagatgttggagatcagctcggacatcccgttgtcgagttgccgtaccctcctctccgctgcctccgtcttgctgcgcgcggtgtagagctcgtcggtaagcgcggacaccttgtcctggagcatggagagcgctcgggctgcttgctcgctttcggagcttgccgacacgaggtcttgctccgcctttgcgcgtctcgcctcgctccgctcgagggcggccctggcctcctccgcctccgtctcggcggctcccttggcgacggcgaaggaggcggcgtcgcgctcgagcgagcccagccgggcgagcgcctcgtctcgcgccgacgccgcctcctccagctgcgcctccgcctcggccctggccgcggtttccactgccacgatgccttcgaggcgggcgcgatcctcccccgcccgctccagcgcctccgtagcggctctgagggcggcctcggattctgcggctcgcttctccgcctgctcgatctgccggtccgcctcccgccggccggcttccgcctcgtccctcgcggcggccgccgcggcgagctccgcctcaagggcgtcggtatgccgtctttgcgccgcagcgtccctctcgagcgcctctgcagccatcctcgcttcggcgacgatagcctccaggcggccgtcggagggcgcttgcggcgcaggtgcaggatcctcctgcagccgagcgggttccggtatcgcggcgggggatcccccgccgtcgaggtactccgtggcggcggccatgttgtcggcgcatgccatctcgctacccggtttcggcttggtgccggcggcgaatatgagcacctggcctacttggtagctctcgccgatgccgccgtagtagaggtcgcggtcggtgatcgtggcgagcacgtggccgcggtatctggatgtcttcacgacgtcacttcccgtactggccgagggactcggggtactcgtccttatgggcggctatccacgcatcgagcgcctcgcgtatgaccagcgagcggttcagcccgtctatgcccttgagccggttgagggccttgttctgatcctcggtgatcatgaagccgtacgtcgtatacgattgctcgccgctctccctcgaggaggcttggcttacctcgccggcgtcggccttcttcggcgttgcgcgcgcggccggtgcccggcgcttgcccgttgacggcttctgcccctcttccccacccttgcgcggcttcgagggagagggggcttccgcccggctcggcgtgacgacctcgggttctggcggtgccggctgggatgcctccttcgcagcggcttcccttgctgcggcgaatcggttcgaggttgccatcagatggctcctttctttctaagatccttcacgaccgcttccagtatcgtatgttcgttggatttgggatgttccaggttgattggcttcgactcgacttcggtgtccttgtaggctacgcggtacgggatgacggtatcaacgagcagaccgcccatgtcttcgcgcgagcggatgtagtcgagcatctcgggtgccagcttgatgcgcttgtcgtagttgcagaccacaagtcccttggtgacgtcggggatgcggagctcggtgcacaattcctcgccccacaagtattggaacatctcgacgccggtgagcccgttgtccgacacgtcggtcacgagcactatcgagtccgcggcgaagaaggcgttttggttaacgaggccgagcccagggttggtgtcgatgatgatgtagtcgtaccggccgaagaactcgctgttgtcctgcaggtagtagccgagcagcctgatccgctcgccttttgccgcgagttcgaattccgttttgaacagcaggatcgaggacggcatcacgtccaggttcggcaggtcgcgcaacggggcgcggatcaccgcgtcctccggcggcgtgccctggttcgtgaggacgtcggcaagggtggtcatgtccgggtcggcaatgtcgatccccaaccccttggaggcgttagcctggggatcggcgtccacgacaagcaccttatagcgctctgcgaggcagccggcgatgttgtcgacgaccatggtctttccagccccgcccttcatggctcccaccgtgacgacccatgcggggttcttctgggacgtcggcgccttggcctttgccattccctgcctccttgattgatagagaactcaaaaacttgaatactagagaacacgagtaaagtatacatcaagaaaaagagtagtcaagaacatgaaaatatgaaaacttgaaaacacaagaactaaaaaacaataaaatatgaaattgtaagaactagaaaattcaagtaatagaaaacttgttaaagcgaggtatagagttcttgaatactcgtgtaattgaggaaacatcccactggcaacgttagtgaagatcacgaatacttgaataatgtagaacacgagtacttgaaaaattgaaaatgagaaaatacaaatacttgaatactagaatatacgaatacttaaatctcataattaaatatgagacttctataccgaaatgctaaacatgtaaatgatgctgcaaataatatttcgcaggttaggccttgaaaaacagccctgggggggggg

SEQ ID NO: 56 - DNA, 4138 bp, Eggerthella lenta
  source 1..4138: mol_type = genomic DNA
acgtggcgttcctggcccctctggattccgattcgcggggcacgcttttccgggacattgctcgtcgacgtaaaatagaatatccggatgcaagtatggttaacgacaagtccatcttaggtaagtcgagccaaactttcagagagaacttctcgtcaagaataagaagcatcatttaccggtatgcgaaacgcttattcgatattaccttcagcgcttttattctcgttgtagcgcttgtccccggactaatacttgcgactgcaattgcgatcgagactaaagcttggcctatctattctcaagagcgaattggaaaaggcgggcacccctttcggatttataaattccggactatggtatccgattcccataacatagaaaaatattttacctctgagcaaatggatgcatggaggcgcgagcgtaaggttgtcgacgacccacgcatcacacctttaggaagagtacttagatctactagcgttgatgagctgcctaacttcataaacgtcttaaaaggagagatgagcgtcattggtccgcgtgcgatttcgtttgacgagctttcaaattttggcgaaaataaggaccttttgctttccgtcccggctggaattaccggatggtggcaggtttcaagacgcaatcaagccaccttcgaaaccggagagcgtcaagctctggaattggaatacgttaggaacgcgggattcattctcgatgcaaaggtttttatcaggacttttggcgttatgttcggaaggagaagaacaggaagatgaagttgtcgctccttcgtcacaacctggaagaacgcctcgcttctgcgtgcaacgcaagttccggagagtctgcaagtcttcgtctgcgttgactaagacgatgcttctcccaaaggcctatcggttatgctttgcaaaggttaaaagatgatttcagatagactcacagagaaatacgaaagttatacgactgtaatacccgtttactttaaagagactgcacgcaatttgaaaaaatgcgtcgatagcgtctactctcaaaccgtccttccggaagaagtatttcttgtctgcgacggcccgctaacacaggagcttgatgaggcaattatatgtttgagcaaaaagtacgggtccttcagagtctaccgtcttgatgagaacaagggggcggccgttgcttttcaaaagggaatggatttgtcccacacggatctcattgagaaattagggagcgacgacgtttgccgcccatgcagggcggaactcctgcttaatgagtttgccgaggatcccaagctggctgttgttggagggtacatgcagatgtatcgtgaagacgcgggagactgtggtgacattagggtagttccatcaactccggaaagtattgtaaagttttctaaaagaaggaatccgtttaatgatacgacggtaattcttagaaaaagcgctgccaacgtcgttggaggatacgatccatcgatgattcgagctcaagactatgagctgtatactcgcataatacattcgggatatagggtgaaaaatataccaatcgtactatgcgatgcccaagaagacgagaaagctattcttagacgaaaaacatggatacacacacgttgcttcgtaaaagttaggtggcgaattttcaggaatggctttagtggccttctggattttcttgtcccatgcgttctccagctattcataatgattcttcccgcgtcggtgtgcttgagctcgtaccgaatccatttaaggaagcagaaaggtatatgtaacgatgactaacaacttcgatcctcctgaagaaatgggtttcgttttagaatccgctctgcttcggtcggtcgccgaccgcaccctcgtctgcggcacggtgggcctcggctacgtggggctgccgctggccgtggagaaggccaaggccggcttcaggaccgtcggcttcgacgtgcaggccgacaaggtggacatggtgaaccgcggggagaactacatcggcgacgtcgtgcaggaggacctcgcggccctcgtcgaggccggcacgctcgaggcaacgtgcgacttctcgcgcatcgccgagtgcggcttcgtcgccatctgcgtgcccaccccgctcgacgcccaccagatgcccgacacctcctatatggaggcgtccgcgcgcgagatagccccctacctcagggagggggtgatggtggtgctcgagtccaccacctaccccggcaccaccgaggagctgatactgcccatcctggaggaggggtcgggcctcgcgtgcggcgagggcttctacctcgggttctcgcccgagcgcgtcgacccgggcaacctcgtctacaagacgaagaacaccccgaaggtggtcggggccgtgggcgccgacgcgctcgaatgcatctccgcggtgtacgaggccgtgctcgagggcggcgtcacgcgcgtgtcgagcccggccgtggccgagatggagaagatcctcgagaacacctaccgcaacgtcaacatcgggctcgtgaacgagctcgcgatgctgtgcgaccgcatgggcatcgacgtgtgggaggtggtcgacgccgccaagaccaagccctacggcttcacggccttctaccccggcccgggcctcggcggccactgcatcccgctcgacccctactacctgtcgtggaaggcgcgcgagtacggcttccacacctccatgatcgaggcgtccatgaccgtgaacgacgggatgccggaatgggtcgcctcccgcgccgcccgcatcctcaaccagtccggcaaggcgatgatgggcgcgaaggtcctcgtcctcggcgtggcctacaagcaggacatcgacgactaccgcgagagccctgccctgcgcgtcatcgagcgcctggaggaacggggcgcggaggtgtcgtactacgatccctgggtgccgcgctaccggcacaaggacgccgagcgcgagtcgatccccgagctcgcggccgaagcggtctcctcggccgacctcgtcctgatcgcatgcgcgcacaccgacgtcgactacgagttcgtgcagaggcacgcgaaagcggtcttcgacgccaagaacgccatgaagaacgtggccgaccgcgagaacatcgaggtgctgtagcatgaaagtagcgatcatcggttgcgggcgcatagcgctcaaccacgtcaaggccgtcgaggcgaacgggctggagctggcggcgctctgcgacgtcgtccccggcaaggccgagggcctcctcgagcgctcggcgtgggcgggccctgcgcccaagatcttcgaggactaccgcgagatgctcgcgacggttcccgagatagagctcgtcgccgtcgccaccgagagcggcgagcacgcgcgcatcgcgctggactgcatcgacgcggacaagaacgtgatagtcgagaagccgatcgccctctccatggccgacgccgacgagatcgtgcgccgcgccggcgagcgtggcgtgaaggtctccgcctgccatcagaaccgcttcaacgtcgccgtccggcatgcgcgccgcgccgtggaagagggccgcttcgggcgcatgagccacggctcggtccacgtcagatggaatcgcggcagggcctattacgaccaggcaccttggagggggacgtgggcccaggacggcggctgcctcatgaaccagtgcatccacggcatcgacctcttgcgctggatgatgggcggcgaggtcgtctctgtgtgcgcgcagacgcgccggcgcttccacgactacctggaggcagaggacgtgggcgtggccatcctgacgttcgcagacggctccgtggccaccgtcgaggggacggcgaacgtgttccccaggaacctcgaggagacgctctacctattcggcgaggcgggaaccgtgaagatcggcgggacctccaccaacaacgtcgacgtgtgggacttcgccgacgagcgcgagggcgacgagggcatcgcgggcctcgaggagcccacctccaacgtctacggcaacggccacgccgcgctctacgccgatgtcgtcgaggcgatcagggacgatcgcgcaccctacgtggacgcgaaggcgggccgcgacgcgcttgaggtcgtgctg

SEQ ID NO: 57 - DNA, 4108 bp, Eggerthella lenta
  source 1..4108: mol_type = genomic DNA
cggctcgtatgtgacgcctccgaccacgacggggttctctgatgcatttttgatggcgaaggtcgcgccttgcattgttccatcgccctgcgcggtcgcgctttggtagtagccatcgagcttcgtcgtctttacgccgccgcggatagaatcgtccaggaattgatgctcattccagacctcagccggattcccctcaatacccgacattgtaatgcgctgcacgaatacgtcgttcggacgcgccgcagaggacagcacgtatccctccggcgctttagtttcctggacggtcacagtgcctaaaggaaacgtcggtgtgccagcagcgccaatataaaacgggtcgccggataccacatacgatgagtcaaaatagcagaaaccgtcagaatccgtacgcataacccacgtgcgcatagggcttatcccttgtgcagctggatcggaagaatagtaacccgcatagtattttacggtgaattccgctcctccgagcgttccacccccttgagcggtgcctccggtcaacgggtctgccttatgaagcaacgcacctaccggatcgtcgtacggcacatcagacgctctaataacagcattgcctgatacatcgaagtaatgtcggctagtatctttaaagaaacccgttggtggttgcgactcaacgcaatagtagttgccataaggcaggccggaggccgatgcgtaaccagatgcattagtcgtcaatgtcagtacataaccgtcatcgtttgagcggtaaacatcgtattttgcaccagagagactgtaaaccgggttgccgttcgtcatatcaggcttagttgagctcttgtagagctcaacagatcctttcggcgtccagtagaagttccctacccgctggcacggataaggcgctaaagatcctggattcttatttgccccggttgtgtcaagcgtcacattgtaagcacgagctccagaatcccaaacccctgtgaaattataagtgccatcggctggcgccgcttgtccatagtccatgcagtggccaatcaaatactggccgtcgggcatggttataccgaaccggttgtaatggtcgttcgtcggcccagggttgagacacaccatgcttgcggtgccacttatggtcgataggtcacgcgcgatcgaccccatgaccggtggagcctgactggccaacaaaagcggatctacaggctgctcggcttcctcttcaacgtcagaggcctcattttttatagattccgaatcttcatccggctctttcgacacggggttttcttcctttgggttatcaggctgcgtttcctgatcaggggtaacttcctgctctagcccatcccccttatctgccatctccgtacttgtgttagattccgagattaccggctgtgcctcgctatttgcatgcccgaaggcttcaacatcttcagagacgggagcaggatcggctaaggccaatccctgtggtatcgccagcgtcaccgctagcatgatagccatcgctgcggacggcaggcgacgcagtatgcctcctccttctttcagcaagttgtctatcattgccctctcccatctcgttcgccttcgattcttctatttccactccccacaggagcagtagtagcggccagtgttcacagtctccgtccctacaggagacggataggcgttgccaacgccttcccctgctagggcatggtttttcagatgacccgcttcgtttccttgaatatcagcgccgcaaatcccacagaaattgtggtaaatagtcttctctgtcgtttcgggaatccagttatggacatgcgccggaggatccggctcgggagcaggagccggcgcagggtcgggcccaggagcgggagcaggagcgggagcaggttccgaggaacctcccccggacgtcgatccacctccggtccccccgctttgcacagcattacccgatgtggcaggggcgctctgcacggccgcctgggcggcgtctgacttgcctgccgcttcgagggctgttgccgacgcctcgacctcttcggcactcatgtcggccagcgctttcggcgcgagagtgatgttgacgattatcttcttttcatcggctgaaaccgtctcgaacatgaccatagcgtcttcgcgctcgttatcccactcaaggccaagcgaccttacggtgttgctcgcgctcgcagcagcatcagagggggctttaagctcgaaaggctcccctgcggtgtaggttgatccgtcttcaagcacgggggctttggacacggacaccttgtaagtggcgtccttcacgaactcatcggcctctacaaggacgatattctcgccgcactcgacctcgcgctcgataggttccatctctccgtgcggggccgcagcttcgacgcgcactgtcgccttagtcgcggtatcagtccacccttcggcttcgattttgaccgcgagggaatacttctggtcattcttaggcgcaaccgtctcttgctccggctgggatttttcgggctggggtgcctccgagggcgttgcagcgcccacgatgcccgcaatgcacagcgcgatcacggcaacgccgaggacggccgctgcgacgatgcggcgcttgcgcttgggcgaacccccgccgtccaccgtttccccttgcgcaggctcggactcgatatccttctcgccctcaatcggctcggtcagcccttcgatcttctcttccgtttgatattccagcttctcggtcttttcgttttcgctcatgtcccaacatcctttcgcccggtcttatgcccagtctgtttgcctagcgcagggttcgtatccctccgatcggcggccccgatgccggggggcgcatggacagaccgggcggagagccatgcgcaccccggcatcggggcctagttcgtcattcttcttgcagcttcgcctccccacccccgtcgtcgaactgcatgaccttcacgggagccgactcccgcagaaccatcccgtcgcgggttatcgcgatggaggggaacctcatcatccgctgcgtcgggcgcagctccttcggcccgcgttccagcctgtcgggcacgcggacgctccacgcgccgtcgcctgttttcacagccttgacccgcgcgagcaccaccacgctgccgtcgtcaaacgtcttggtgatgcgggcgcgccgcctccagaccaccgctacggcgatgagcacggcacctgtcgcccccgctccgacgacgtaggggatcacatcgaacggctgctccggctccggctcaggtgcgggtgcaggctcgggaacctcgtggtagtaggtaacgtccagcgccatgcgcctgtccttctccgtcgcgatccccttgtaatggcctatgacggtgtaggcgatcgtctcgaggtagtcctcggtgccgcggtagttggcatgggccgtgtacgatacggggagccctaggtcgtcggtggccgtgacctcgaactcgacgtcagagagggccagggtcttggtcgtcgtcgtatcggggccatcgccgcttgtcacggtgaagtccgcgtacgcgggtatcgtcgcatcgacgtcgttggtgggcagcccgggatagtccaccggccggtcaacctgacgggtgcggagctggtagacggggatctgctcgacgctgtcaagcggcagatccccttcgtagagtggatcgatcgtcgacgcgtccatcgtggccggcatgctggcgatggcgtagctaacatcgagcacgcccgcttccacggtcgtgtcatgctcgagttcggcggtttgccgctcgtacgattcatcaacgtagggttcgccttgcttttcgagtttgtaggcattgccgccgaactctatagacgatggcacgagcccttccggcatgccggacgcttccatgtaagtgaacgttttgacgatcctgtccccgtcgcccgcggcaagggccgcggccggcggcgacgccagcgatgccgcgagcaggatcgaggccagcgcggcagccgttttcagcagttggttggagacgggtttttcctgggtcgccatcgttcaccctttctatgcgcttttcattaatccatgata

SEQ ID NO: 58 - DNA, 3770 bp, Eggerthella lenta
  source 1..3770: mol_type = genomic DNA
gccggtcttgatccgcgacaggttcacattggtgattcccacgcagtgcgacagcttctggagtgatacgcctcgatcctccattatttcgtcaagctggacggcgatggccatgtccgtaatatccttccaatgcctacgaccagaccacgataccacgtcgtgcgctaaatgctcactcaaaatgatgcgctcgccatccggccatgccggaacatgggcgcatgtccacgataagggtgcaatacgggttgaggatcaaggatctgcgcgacgagcgcggattgtcccaacgcggcttcgccgcgcggatcgggatgagtccgacttacctcgccgatgtggaacgcggcgcccgtaacgtgagcatcgacaacatgaagaggatcgctgacgggttcggcgtgacgttccacgaaatgacggaggtcatggagtaggaacgccgctcgctgcgagaattctagatggggcgcttagttagttccggctccaagcaatcccccgaaagagccgacgatctgcggtttttaagacactccgtgaccaggttagccgcaaaactcaagatgtttcgcagagggcattatacctcgtccgattcgcgcaccatgcgcccatcgtagctgctctttacccagcgcgtaacgtggtcgcttccctcggtcgtctcgtgccagatgttgcagaactggtcggccgtctccgcttgccaagagcgcctaccgccaacctccaagacaaccggaggctcctcgaaatactccaccttgattcgctcagccacgatccgctcccttcgtcggaaaacacccttcggacgttatacgacgggtcaacccacgcaggtgtcccacgttcgggtcatccatggattttcccggaaaaacctacccgtcctgccgatcccacggccaccgccagcgccggcgctccttctgctcggagctttccagcgcgcgctcctggacgttggccgcgtgcagcgcctgggcggctttcgccgtctcctgcgccgcttccagcgcgcgccccaagctcgctatctgatcgtccttcaccgcaagctgatccgtgagcgcggcgaccgtttgcgcccacccttcaccggcgcgctcggtgtctggcaaacgtatggcatcgtgtatggcaccctcgatcacctccgttgccgatttcccgctatctgagcatagtttctccagctcgtctatcgtttcctgttcgaggcggtacgtctttttgaccttcacgactgtatggctcccgtctggcaatccgtatggcaaccatcgtccacgcgcttcgctcgcagcgcgtcgcgatcctcctgcgtgaccacctgcgccgcgcggaagctcctcatgtagtgctcgatggcgtagcagcaggaatcgtccaggagccgcgaccattcgtcgttgtgttcgtcgcaccagtcccagaacaggtagaagtccacgatgttgttctcgcgtatgaacgcgcgcatctcccgcagcgccaggtgcttgtccgaggtcgtggcgcacaggtcacgccagtccgcgccgccgaactcgcaaacgccctccgggtcgtactgggccttgtcggggctgtccatgtgagtgaggtagcgagccatcgcgggcaggctcttcacgtacttcacgttcttggatttcaggaacgcgaagtccttcaccacctggtcgtacgatacggggttgtcgtacatcgccagcaggtgccggtgcggttccttcaacgtacccgccttgtgcttggggttcttcttctcgtcgcgcgccgtccactcgtcggcatcgtgggacggggacaccaacgttctcatccccagctcgtcgagctcgtcacgccactccggacactgatcctcgtagaacacgagcatccagttagtgcgccgttgcttgcgtttctcctgctcgtacctgcgtttcgcttcgcgctgcttgtctggatcggcatagggcataaaaaaacctcctggtgtcggaggcaactcgttttcgtggacggtatgaacctaccatggccgcacctcccccgttcgtgatacaatacgaggtggtgctgggcgcgagctgctatctcgtttccggcgtcgtttgagttgctacctcaaacggcctgaggccattctaacatgacccgcccgcttgccgccggcgggttttttgttgccctggttcatcctaacaaaatgacccttttatggaacccgtttgacctgggaaaactcggtttttcgcttctataaccccaggtcaacagggtaccggggtcggcagtcggcatcccccggggtgggggtcgcagaaagccccaccccgaatcaacccgaaaacccaaggtcaaaacctcgcagtgaaggacggagaggttcaccgggaatgaccgtcaaagcgacggaggcccatcgcagggcctccgattccgtctcaaccgacttcgcctcatgcgagggcgaaaccatgccttaaaacggctctcgttgcccccgatgcggctttgagcaccttcctgaagcacctagaagaacgccacttcgggaatctccgcgatcatggcctcgttcgccgcactgcgctccgcgttcgacaggccgagcgttacaaagaagccgccgttttcccgttctgccgccccatggcttcgcctccatgacttcaccgcttcctcacgccgcctgctcgatgccatcccgacgattcccatctcccagtcgatctgcctttccgacttcgcggccatcccctccggctcgttttccagcagccagccgtacagggcgatcgccaccgggtcggcgcgccacttgctgatggagatcccccaatccacgaactcacctccaagcccgttttcctcggcttcggcaaccaggttttcgtacaacatccgataatccatcaacgccacctttccccacgatcttcattcccccattatgcgacctcgacggcagaagggaggttagcaagagacgcacgttgtaacacaaaataaattttgcgttacaacgtgcagcggggcttccgccccgaaccctggagcgcgccggttgcgcgcaagccggaggcggtgcctccgtgccgtggtcggcgggcggtgtaacgcccctcgctcgcgctcgctcgctccgctcgaaacgaaagagggtacagggtgcttgcaccctgtcactgccgaatttccggatgccttccgattcccgcatggctttcaagcgcctaagccatcctgatcttggttgacttcgccgtctccttcactgcgggtcttctttccgcatgaaagcaacccggctcctgcccgtggtagaatctccggcggtgctccgtcatgtcctgggcagcttccgaaaggagtgctcatggacgcacagacagtcattgcagtatgcgatttgttgttggtggttgtcgcgctgatcgacctgttcgggaggcgcgacgaatgacggacggtgttgggacaacaagaaagccggtctcccctggaaggtaaaaccggcttagtcagttaaccgatgctgcccgggtgggcggggcaccgattgtctcgcattatagcacgctcccggatgttgctccagcaacgctgcgggagcgttcatcaatccggcatcttcgctaaaaaccccttcaccgtcagctcgttctcgacggctacggctccacgtacttcaatatgtctcctggctggcattccagggtttcgcatatcttttcgagcgtcgagaagcgcatggatcgcacctt

SEQ ID NO: 59 - DNA, 3500 bp, Eggerthella lenta
  source 1..3500: mol_type = genomic DNA
accttcgcccaacccgtctgcatggcccccgatccgtcgaagtagtaccacttgccgtcggccgcctttgcccagcccgtggccatggcgccggagtcggtgagccagtaccacgtgcctccctgcttgatccaggagttttgggtggcggctgcgctgttcgcgaaccagtaccatgatccgcccagcttcttccacccctgataggcctgtttgagcccttggtagtacaagacgagtcgggggtcgtgattgaacgcgtggtacgtggcggcgtcctccatgacgttcagatgcaggccatctctcgcgaacgtggccacgacggccccgtatccgttcgccgacgcttccggcgcggtgaagtagcggacgccgagccggtcaagggtcttggtcgcgtattcgggaagattgctgctgttgcccgtctgcacggcgtacgtgggggagagtgctgtcaggtaggacggcgtgttcgatccgctcaggccgtgatgagccagcttgagcagatcgacgtggcctatcatgcccgaaagccgatcctcgtctccatcgtagttgttaatgtctcctgcgaggaaggcggtggagccgcccgccttcaccttgacgccccaggagaagtagttcgcgtcgggcacggggttgaacttgtagtcgtctccgtagttgacgatctcgatgttcatgtctcctagggtgaagaaggggcttcccgtggtcgaggggtcgggggcgtgctcgtggatcaggttgggatcgaccgaccgggtgaccgcgatgccctcttctggcagtaattcggagttgtacggatcgtcctggtcggtggggtccacgccgaagcgctccatcacgccttcggcgtccagcacgtcggcttgcggagcgtcgccgacagcagtcaagtcgctttgagcttcgacggggttcggcgcgggttccacgggcgcgttcggatccaggttctggatcaggatggcgcccgtctctttcgccgcagcgatagctctgtcgtacacgtactggttgtcccagaggcgagcttcgtccgatatgaatgaatcctgatattcagccaggtacacgcgctgggggcggaactcgcggatgatctcgtcggcggagcctatgtggtcgctgtggggatgcgtgccgaggtagaactcgaggttgcccgaattcaccccgaggtttttcaggtatgcgacgacggcatcctcgacgccgctcccttttacgattccggggcggagcgggtagcgtggatccgatccgtcagggtaatcgctgtcctcgcctgaatccacgatgccgaagcggccgttgctctccaggacgatggcgtccgtgccggcgaaggggaggatatggatgtgcgtgtcggcgctcgccgcttcggtctggctctgatcagcgtacgcgacctgtgcgctttcgaaagccggaactgcgtaaacggccgcgagcatgatcgcgagcatgggtcggaagatgtcgaggcgtggcggatgcatgaggttcacggagatctccttgacgataacgcgcaagacgtgcggactcgttgctttcgctcagtatacgccatctgtcgagaggtcttcgggaggggctcgtttactgatatactcatcagcggtaatatttgcgacaacgcatcgtagtagcaactgacagttcgaagtacggaggtgctccatgcaccaggtttcatcccgattgtccaagctggccttgtcggttatgctggctttcgcgctcgttcccacggcttccgtggccgcgatggccgatccccagatctccgatccggcatccgacccggtcatccagtcgccttccatcgatcagggtgtgtcggaagaggctcccgcttctaccgaatcgtggcaaggggagggctcggagcccgctgaggcggacgaaaccgcccaacccgatagcgaggccgaagcctcggcggcggctctcggtcccgaccggcaaccggtgggcttcgtgtacttcgacgaaagctcccccagcgcgggcggttcccagctcgtcgtggttgcgctggacgacgagtcgatcgagctgacgtccgcagaactgacgctgacggctccttcgggcgcgtcggtcaaagcgaccgcttccgagtacgcgggcaatgcggcgctcttctccgtagacgttccggaggccggggagtaccgtctcgaacggatggagggcgcgtctgccgccgacagccgcacgctgctggtggatctgtcctcctgcgagggcgagccctacgcgttcatggtggccgagccgcaagccgaagcgttttccctgtccgatgagtcgaccggcggcgtgtccgtgtacgcactgaccgacgacggccagcttgaggaggcatcgtccttcgaggaggctgcgcagctgtccgccgaagcggcttctgccgtcgcaggtcgttcggccgcctcgggcgcgcgcagcccctccggcaagttcgtggttgccttggatcccggccacggaggtagcgagcccggggcttcggccaacggtttggttgagagggagctcacatggaagatcgcgttgtactgcaaggaggcgctggagtcctatgcgaacgtcgaagtggtgctgacgcgtggaagcgacgaaaaggtgagccttgttgagcgcgtgaaccgcgcggttgacgcaggagccaacgtgttcgtcagcttgcatcttaactccggacctgcttcgggcaacggtgccgaagtgtggtatccgaacgacagctcgtatcgtcacgagcttcacgaggagggcgcacagctctccagcaagatcctggagaagctgactgcactcggcttgaccgaccgcggcataaaagtgcgcgattcggagcgcgtggatggcgaaggcccgttctactatcccgatggcagcatccaggactactacacggtcatcgaggcaagtcgcgaagccggcatcgtgggcatcatcgtcgagcacgcattcctgtctaataagagcgacagcgacaagctgaaaagcgaggcgttcctgaaggagctgggctacgctgatgccgagggcatagccgagacgtacaagctctcttctgggtgggaaatcgacaacggccgctggaagctgaagctggccgacggtacgtatgctacgagcagctggcagcaggtcaagggtaagaagtactggttcggggcggattcgtacgccgtcaccggatggcagaccattgatgaaaagcgctactatttcgacagctcgtgtgccttgcggacagacgggtggttgaaagacgacgggtcctggtattggctttcgtcttccggcgtcatgcagacggggtggttgaagctgggtggaacgtggtactggctcgatccgcagactggcaagatggcaacgggctggacgacggcttcggacggacatcgctactacttcgacggatcgggggccatgcagacgggttgggcgaaggt

SEQ ID NO: 60 - DNA, 1382 bp, Eggerthella lenta
  source 1..1382: mol_type = genomic DNA
gcagccctcctccaggcgcccgagcgcgtcctccagcgagcccgccgtcagctcgtcgtccgggcgcgtcgacgtccgccacgccaccgggcagccgtcgaagcagtctatgatcggggagaggtagaccttgaggccgccgaggtcgaactcggtcacgtcggtcacgacgagcctgcccggcgcgtcggcgcggaagccgtgcgtcccgtcctctcgaagcggcaggttcgcggggcgctcgtcggtctcgcccgcgtaggagctgtggcgccggcgctccttgacctggaccgggacgagcccctcctcgcgcatgatccggcgcacgaccttctcggagacgacgacgggggcctccatgtccccgggcgcgaggtcgcgggcgcgcacgggcgcgccctcgccccgccgcagggccgcccacacgctcagcgacccgtagcggcccttcgagccctcgaaggccgcgcgcacgcgcgcccgcagggccgcgtgcctgtcgggcctggccgccatcgccgcctgcgagaagtacgtgctcctggcgatgcggaaatccctcaggacgtcatcgaccctcgccctcgccgccatcgccctcgccctctcgcccgcccggcgcttctccgaattgctcaaagagcccgggcctggtgcttttaggacgtccaacaccgccagcgcctccgcgagcctgacctcggccagccgcgcccgctcgacggggtcgccttcggggaggtcgccccatgcgcgggaccattcgccccgctcgccgccttcttccttcgccacgccctcgccgcccttccccttcgtcgcgcgcttccgctcgacgccggccttgtccagccagcggcgcacggtcctcctgtccgcgccgatccgtccggctatctcggagacggacgaccctcgcgcgaacatcgtaacagcttccccgcgctcgcgctcgccgtcgggacgggaccggccgtcgagcccgtcgaggcgccccagcctggaggcccacaggcggacgggggcggcgctcgcgatcccgaggcgcccggcgacgaagcgcggctccatgccgcccgcgaggagccgcatcgcctcccgcttcgtcccgagggggtagggctcccatgcccggcggccctcgcacctgcccggcaccgcgagcgcgggcgggcgcaggaggccggccccctcctcgcgcgcgaaggccgagagcgtcgccgcgcacgggaacccctcgaggctcgagcacgccgcgcgcatcgacatgccgctcgcgtggaacctgctcaggacctcctccttgtattctttgccgtaagccattcacggacctctttcctcatcgaaattcagtccagaaaaacgtccggggtccc

SEQ ID NO: 61 - DNA, 1358 bp, Eggerthella lenta
  source 1..1358: mol_type = genomic DNA
gccatgtacaagagccagaagacgggcctgcccgtgaagctgccgctccaggatttcgcgagcaccgacatggaaggcgccttctgatgcccggctacttcgtgcacgaaagcgcgtttgtcgacgaaggggcgtcggttggtgcgggcacgaggatatggcatttcagccatgtgcagtcgggtgcatcgatcggccgcgattgcagcttgggtcagaacgtgaacgtcgcggcaaacgcgcgcatcggcgacggatgcaggatacagaacaacgtcgcggtttacgaaggggtcgaactggaggactacgtcttctgcggcccgtcgtgcgtgttcaccaacgacctcacgccgagggcgaaataccccaaaggccccgccgcgttcaagaggacggtcgttcgcgaaggagcgtcgatcggggcgaacgcgacgatcgtctgcggaaacgaaataggcgcatgggcgatgatcggctcgggcgccgtggtcacgtcaaacgtccggccgcatgcgctcatgctgggagtgccggcgcggcagcatggatgggcatgcgaatgcggagccgtcctttccgaagatttggcatgcgaggtttgcgggaggacgtacgtgcaaggcaatgagggactgaatgaggtgcagcgtggaatttcgtgatctgaaagcccagtaccgggcgctcgagcccgagatcgtcgaggcttcgctcggcgttcttgggtcgggctgtttcatcggcggcccgaaggttgcggagctcgaaacccggctcgcagactacgtcggcgccgggcactgcataacctgcgccaacggaaccgacgcgctgcagctcgcgctcatggcttggggcgtcggaccgggcgacgcggtgttcgtgcccgacttcacgttcttcgcgagcggggaggcgccggcgctgctcggcgcgacgcccgcgttcgtggacgtcgacgagcggaccttcaacctcgatcccgtcaagcttgaagaggccgtacggttcgtggagaacgagaccggcctcctccccagggccgtcgtggcggtcgacctcttcgggctgccggcggattacccggcgatccgcgaggtctgcgagcgccacggcatgctgctgttggaggacggcgcgcagggcttcggcggctccatcgacgggaagatggcgtgctcgttcggcgacgtctccaccacgagcttcttccccgccaagccgctcggctgctatggcgacggcggcgcggtgttcaccgattcggacgaatgggcggagctgatccgcagttacgccgtgcatggcaaggggtcgatgaagtacgacaacgtgcgcgtcggcatcaacagccg

SEQ ID NO: 62 - DNA, 1273 bp, Eggerthella lenta
  source 1..1273: mol_type = genomic DNA
gggttataggcaagaaagtgtgtccagagcctaatcgtaatccatgcgataagggccgcttgcatgcaggtcattccattgcacagcagtgccccagcgccccaccgcttcatctttttcgctagcttcggcagctgctcgataaaactcagcaatcaggacgtccgtcggcatttccttcaggatctctttcgggcttgcacgggcttcaaggtccatatagcaccaccagaacgccgccttgacgcgcctcgtcagcctcaatccccgatgctctcgcagcatgtggcggatctgggcgttcacgccgccttcgatcctgttcgtagtcgccggaacaggtcctccctcgagcaggccttcgtcgagataggtgaatagggtaccggccctacaaagcttcagaagcccgccgcgcgcagtgcgcagcctctcgtgcttgtagcggatccgcccgtcaaccacctctttttcctttaggaatccttcccatgccgtgcaccaattagagaagcccgcaagccactccgcagcttcgttgaggctacctatgcgcatgagcttcttggcgatgccatagagctcaacgcccgcctggagccgcggcctggtcgtggtctggcgcttcacctgacagaacgcatggaagacgcagcgctgcacgcgtgtgttcggccacacggcgcgtctcgccttctcgaacccctttccgccatcggtaatcacgacgtcgggaggggctatgcgcgccatgagcgccgcccacgcctgcgcgttctcgcttctcgctagatgccagccgatcacgtgcttctcggtgcaggcgatcataatcacgacgtcgcgccccagccaaaggccatccacctccaccacgtggtggacctcgtcacagacaggagccacgggccacaggtcccagaacttattcgtgagatgccggaaggtgcgtccgggcatgccgaactcgccttgggtctttttcgagagcagccacctcaggaacagctctagcagtttaggctcgttgtcgtaacgttgcgtggtggatgcgccgcatgccttgcagcgccaacgagtcgcccccgacgaggtcttcccgttgcgtttcgtgtcgcccccgcacgcagggcacagtatcttcttcatcccgtgattgaaccacggaatttaagagggcggtttacggcctctgacctgcggtgtcaagtcgaaagcggacacacattcttgccaggcacttaaacctgcctccgaaatttaaacgatggtt

SEQ ID NO: 63 - DNA, 331 bp, Eggerthella lenta
  source 1..331: mol_type = genomic DNA
gggggcacggacgtttttctggactcctacgcggctgcggcgagcgccgccctatgggccgctatcgtcttccatccgagcgatctcttgatcttctcgtcacgataccacacgatgtactcgtcgagggcccgcacgaagctccccttcgtcgtccccttccagtccctcgcgtagaagaactcctgcttgagcgtcccgaagaagccctccgccctcgcgttgtcggggctcttggccttgcgcgacatcgacctgacgaggccgttggcctcgcagacgcccttccatctggcggagcggtagttgccgccgccgtcggtgtggacgg

SEQ ID NO: 64 - DNA, 263 bp, Eggerthella lenta
  source 1..263: mol_type = genomic DNA
accaggagccgcccttgctcagccagcccgtctgcatcgccccggagccggagaggtagtaccaggaggagccctgcttcatccagccgccggagcgcatggcgccggagccttcgaagtagtaccacttgccgtcggccgccttcgcccagcccgtggccatggcgccggattccgggtccagccagtaccaagtgccgccgagcttgagccagccggtctgcatcgccccggagccggagaggtagtaccaggctccgccc

SEQ ID NO: 65 - DNA, 261 bp, Eggerthella lenta
  source 1..261: mol_type = genomic DNA
cccacgcaggagctgggcgacctcttgaccatgatcgagaacctgcccgagggcaagaagatcgaggactgcaagctcgccttcatcggcgacgccacgcaggtgtgcgtctccctcatgttcatcgcctcgaagatgggcatggacttcgtgcacttcggccccaagggcaagcaggtgaccgacggcggcctcgtggtcgactccgacgtggacatcatggccatcgccgaggagaactgcaaggtgtccggcggcacc

SEQ ID NO: 66 - DNA, 255 bp, Eggerthella lenta
  source 1..255: mol_type = genomic DNA
agctggatggtgcccgggccgaagaactgcgcatggccgcccaggtcggtcatggccgtctcgaaggagatgcgggtgcgggtggacacctgctggaagatcatgccgagcgtctggttcttgaggatcagcgggtagcggccgccctccttgatcatagccttcatggactgcgccagctcgatcatgtcgagcagctcttccttggtgaagtcgttggtgtcgatgtagtccttcactgccatggttcctcct

SEQ ID NO: 67 - DNA, 192 bp, Eggerthella lenta
  source 1..192: mol_type = genomic DNA
tggctcgtatacgatcccgtccaccagcacaggattagcggaaacgctcttgatggcgaaaacggccccttcgacgctggcggatccctgcggtacggacgtttggctctgatggtcgagcttcgccgtcttgacgccgccgcggatcacctggttgtctatcgactgctcggtggtagcctcgacgaccac

SEQ ID NO: 68 - DNA, 177 bp, Eggerthella lenta
  source 1..177: mol_type = genomic DNA
agacttaaacattgaaccatttctcccgttcgaaatactgcagcaaactgtaagccattcgtaaactgcctgtcgattgtacccgaaaaactatccctggcaaatactccaataggcaagtcccggaaatcctgtcacacgtaaagctcgtgacctgggatgttgcgccgttttctc

SEQ ID NO: 69 - DNA, 160 bp, Eggerthella lenta
  source 1..160: mol_type = genomic DNA
tcccgctctcggggtcgagccagtaccaggagccgcccttgctcagccagccggtctgcatcgcgccggagccggacaggtagtaccaggaagatccctgcttcatccagccgccggagcgcatggcgccggagccttcgaagtagtaccacttgccgtc

SEQ ID NO: 70 - DNA, 159 bp, Eggerthella lenta
  source 1..159: mol_type = genomic DNA
ggcaaggacgtggccaccatcacctccggcgccgacggcgtggcgcagaccgcgagcgaccttctgccctacggcacctacgagctgcgcgaaaccgtcccgccggagggctacctgctctccgacgaagtatggcgcttcgagatccgcgaggacggc

SEQ ID NO: 71 - DNA, 151 bp, Eggerthella lenta
  source 1..151: mol_type = genomic DNA
cggcggccacgagaccctcgaggacaccgcccgcgtcatgggctcgctcgtcgacatcctcatggcccgcgtgaaccgccatcccgacgtggtgaacctggcgaagcactccgccgcgccggtcatcaacggcatgtccgacttcaaccat

SEQ ID NO: 72 - DNA, 151 bp, Eggerthella lenta
  source 1..151: mol_type = genomic DNA
gggcggccacgagaccctcgaggacaccgcccgcgtcatgggctcgctcgtcgacatcctcatggcccgcgtgaaccgccaccccgacgtggtgaacctggcgaagcactccgccgcgccggtcatcaacggcatgtccgacttcaaccac

SEQ ID NO: 73 - DNA, 129 bp, Eggerthella lenta
  source 1..129: mol_type = genomic DNA
gcgcgcgagatcgaggaagatccgcgctggatgcgcgccatctgcgcatgatacgcggtcgctatactaagaggtacgaagcgcagaggcggcgcggcaccacacccctttccaccagatgctcccgag

SEQ ID NO: 74 - DNA, 127 bp, Eggerthella lenta
  source 1..127: mol_type = genomic DNA
cgaggccttctcccagcccgtggccatggcgccggattccgggtcgagccagtaccaggagccgcccttgctcagccagcccgtctgcatcgccccggagccggacaggtagtaccaggttccgcct
